(19) United States
(12) Patent Application Publication
(10) Pub. No.: US 2025/0032566 A1
(43) Pub. Date: Jan. 30, 2025

(54) GENETICALLY MODIFIED PHAGES AND USES THEREOF

(71) Applicant: Yeda Research and Development Co. Ltd., Rehovot (IL)

(72) Inventors: Rotem SOREK, Rehovot (IL); Erez YIRMIYA, Rehovot (IL); Azita LEAVITT, Rehovot (IL); Gil AMITAI, Rehovot (IL); Jeremy Elliot GARB, Rehovot (IL)

(73) Assignee: Yeda Research and Development Co. Ltd., Rehovot (IL)

(21) Appl. No.: 18/713,665

(22) PCT Filed: Dec. 5, 2022
(86) PCT No.: PCT/IL2022/051292

§ 371 Date: May 27, 2024

(30) Foreign Application Priority Data
Dec. 5, 2021 (IL) 288680

(51) Int. Cl. A61K 35/76; C12N 7/00

(52) U.S. Cl. CPC A61K 35/76; C12N 7/00; C12N 2795/10022; C12N 2795/10033; C12N 2795/10052

(57) ABSTRACT

Genetically modified phages are provided. Accordingly, there is provided a genetically modified phage comprising a polynucleotide encoding an anti-defense system polypeptide. Also provided are methods of producing and using same.

### RELATED APPLICATION/S

[0001] This application claims the benefit of priority of Israeli Patent Application No. 288680 filed on Dec. 5, 2021, the contents of which are incorporated herein by reference in their entirety.

### SEQUENCE LISTING STATEMENT

[0002] The file entitled 94587.xml, created on Dec. 5, 2022, comprising 2,071,571 bytes, submitted concurrently with the filing of this application is incorporated herein by reference.

### FIELD AND BACKGROUND OF THE INVENTION

[0003] The present invention, in some embodiments thereof, relates to genetically modified phages and used thereof.

[0004] The ongoing arms race between prokaryotes and the viruses that infect them, bacteriophages (phages), has led to the continuous and intensive evolution of efficient resistance systems to protect prokaryotes from phage infection. Bacterial and archaeal genomes can contain many different kinds of anti-phage defense systems, which can be clustered in genomic islands termed defense islands [Makarova et al. J Bacteriol. 2011 November; 193(21): 6039-6056; Doron et al. Science 2018 359(6379):eaar4120]. Typically, prokaryotes defense systems target one or more of the stages of phage infection in order to thwart the attack, and are rapidly evolving and diverging to answer the fast evolutionary response of phages to these defense strategies [Bernheim and Sorek Nat Rev Microbiol. (2020) 18(2):113-119 and Labrie et al Nature Reviews Microbiology (2010) 8, 317-327].

[0005] Whereas early research focused on restriction-modification (R-M) and later on CRISPR-Cas [Labrie et al Nature Reviews Microbiology 8, 317-327 (2010)] as the main mechanisms of defense against phage, recent studies exposed dozens of previously unknown defense systems that are widespread among bacteria and archaea [see e.g. Bernheim, A. & Sorek, R. Nat. Rev. Microbiol. 18, 113-119 (2020)]; among them the BREX system [Goldfarb et al. EMBO J. (2015) 34, 169-83; and International Application Publication No. WO2015/059690], the DISARM system [International Application Publication No. WO2018142416], and the Thoeris, Hachiman, Gabija, Septu and Lamassu systems [Doron, S. et al. Science 359, eaar4120 (2018); and International Application Publication No. WO2018/220616].

[0006] On the counter arm, phages developed mechanisms that allow them to overcome bacterial defenses [see e.g. Samson, J. E., et al. Nat. Rev. Microbiol. 11, 675-687 (2013); and Ofir, G. & Sorek, R. Cell 172, 1260-1270 (2018)]. Multiple phages were shown to encode anti-restriction proteins, which inhibit restriction-modification (R-M) systems by direct binding to the restriction enzyme, masking restriction sites, or degrading cofactors important for R-M activity [see e.g. Atanasiu, C. Nucleic Acids Res. 30, 3936-3944 (2002); Walkinshaw, M. et al. Mol. Cell 9, 187-194 (2002); Iida, S., et al. Virology 157, 156-166 (1987); Drozdz, M., et al. Nucleic Acids Res. 40, 2119-2130 (2012); Studier, F. W. & Movva, N. R. J. Virol. 19, 136-145 (1976)]. Phages are also known to encode many CRISPR-Cas inhibitors, which function via a variety of mechanisms that include inhibition of CRISPR RNA loading, induction of non-specific DNA-binding by the CRISPR-Cas complex, prevention of target DNA binding or cleavage, and many additional mechanisms [Thavalingam, A. et al. Nat. Commun. 10, 2806 (2019); Lu, W.-T., et al. Nucleic Acids Res. 49, 3381-3393 (2021); Bondy-Denomy, J. et al. Nature 526, 136-139 (2015); Stanley, S. Y. & Maxwell, K. L. Annu. Rev. Genet. 52, 445-464 (2018); Li, Y. & Bondy-Denomy, J. Cell Host Microbe 29, 704-714 (2021); and Jia, N. & Patel, D. J. Nat. Rev. Mol. Cell Biol. 22, 563-579 (2021)]. Phage proteins and non-coding RNAs that inhibit toxin-antitoxin-mediated defense have also been described [Otsuka, Y. & Yonesaki, T. Mol. Microbiol. 83, 669-681 (2012); and Blower, T. R., et al. PLoS Genet. 8, e1003023 (2012)].

[0007] Harnessing phages and their defense mechanisms as anti-bacterial agents for therapeutic uses has gained much interest over the last decade, especially in light of the substantial rise in the prevalence of bacterial antibiotic resistance, coupled with an inadequate number of new antibiotics (see e.g. Gibb et al. Pharmaceuticals 2021, 14, 634).

### SUMMARY OF THE INVENTION

[0008] According to an aspect of some embodiments of the present invention there is provided a genetically modified phage comprising a polynucleotide encoding an anti-defense system polypeptide.

[0009] According to some embodiments of the invention, the anti-defense system polypeptide is selected from the group consisting of:
[0010] (i) a TAD1 polypeptide having at least 80% identity and/or an e-value≤0.05 to an amino acid sequence selected from the group consisting of SEQ ID NO: 22 and 323-577, and wherein expression of the TAD1 polypeptide in a B. subtilis BEST7003 comprising SEQ ID NO: 741 increases sensitivity of the B. subtilis BEST7003 to infection by at least one B. subtilis phage selected from the group consisting of SBSphiJ, SBSphiJ1, SBSphiJ2, SBSphiJ3, SBSphiJ4, SBSphiJ5 and SBSphiJ6;
[0011] (ii) a HAD1 polypeptide having at least 80% identity and/or an e-value≤0.05 to an amino acid sequence selected from the group consisting of SEQ ID NO: 32 and 595-610, and wherein expression of the HAD1 polypeptide in a B. subtilis BEST7003 comprising SEQ ID NO: 742 increases sensitivity of the B. subtilis BEST7003 to infection by at least one B. subtilis phage selected from the group consisting of SBSphiJ, SBSphiJ1, SBSphiJ2, SBSphiJ3, SBSphiJ5, SBSphiJ6 and SBSphiJ7;
[0012] (iii) a GAD1 polypeptide having at least 80% identity and/or an e-value≤0.05 to an amino acid sequence selected from the group consisting of SEQ ID NO: 33 and 675-737, and wherein expression of the GAD1 polypeptide in a B. subtilis BEST7003 comprising SEQ ID NO: 740 increases sensitivity of the B. subtilis BEST7003 to infection by at least one B. subtilis phage selected from the group consisting of SpBeta, SpBetaL6, SpBetaL7, SpBetaL8;
[0013] (iv) a DSAD1 polypeptide having at least 80% identity and/or an e-value≤0.05 to SEQ ID NO: 739, and wherein expression of the DSAD1 polypeptide in a B. subtilis BEST7003 comprising SEQ ID NO: 746 increases sensitivity of the B. subtilis BEST7003 to infection by a B. subtilis phage SPR; and
[0014] (v) a TAD2 polypeptide having at least 80% identity and/or an e-value≤0.05 to an amino acid sequence selected from the group consisting of SEQ ID NO: 1046-1295, and wherein expression of the TAD2 polypeptide in a B. subtilis BEST7003 comprising SEQ ID NO: 741 or 1300 increases sensitivity of the B. subtilis BEST7003 to infection by at least one B. subtilis phage selected from the group consisting of SPO1L1, SPO1L2, SPO1L4 and SPO1L5.

[0015] According to some embodiments of the invention, the anti-defense system polypeptide is selected from the group consisting of:
[0016] (i) a TAD1 polypeptide having at least 80% identity and/or an e-value≤0.05 to an amino acid sequence selected from the group consisting of SEQ ID NO: 22 and 323-577, and wherein expression of the TAD1 polypeptide in a B. subtilis BEST7003 comprising SEQ ID NO: 741 increases sensitivity of the B. subtilis BEST7003 to infection by at least one B. subtilis phage selected from the group consisting of SBSphiJ, SBSphiJ1, SBSphiJ2, SBSphiJ3, SBSphiJ4, SBSphiJ5 and SBSphiJ6;
[0017] (ii) a HAD1 polypeptide having at least 80% identity and/or an e-value≤0.05 to an amino acid sequence selected from the group consisting of SEQ ID NO: 32 and 595-610, and wherein expression of the HAD1 polypeptide in a B. subtilis BEST7003 comprising SEQ ID NO: 742 increases sensitivity of the B. subtilis BEST7003 to infection by at least one B. subtilis phage selected from the group consisting of SBSphiJ, SBSphiJ1, SBSphiJ2, SBSphiJ3, SBSphiJ5, SBSphiJ6 and SBSphiJ7;
[0018] (iii) a GAD1 polypeptide having at least 80% identity and/or an e-value≤0.05 to an amino acid sequence selected from the group consisting of SEQ ID NO: 33 and 675-737, and wherein expression of the GAD1 polypeptide in a B. subtilis BEST7003 comprising SEQ ID NO: 740 increases sensitivity of the B. subtilis BEST7003 to infection by at least one B. subtilis phage selected from the group consisting of SpBeta, SpBetaL6, SpBetaL7, SpBetaL8; and
[0019] (iv) a DSAD1 polypeptide having at least 80% identity and/or an e-value≤0.05 to SEQ ID NO: 739, and wherein expression of the DSAD1 polypeptide in a B. subtilis BEST7003 comprising SEQ ID NO: 746 increases sensitivity of the B. subtilis BEST7003 to infection by a B. subtilis phage SPR.

[0020] According to some embodiments of the invention, the genetically modified phage, having an increased infectivity to at least one bacteria as compared to a non-genetically modified phage of the same species.

[0021] According to some embodiments of the invention, the polynucleotide is heterologous to the phage.

[0022] According to some embodiments of the invention, the phage comprises genomic segments of a distinct phage integrated in a genome of the phage.

[0023] According to an aspect of some embodiments of the present invention there is provided a nucleic acid construct comprising a polynucleotide encoding an anti-defense polypeptide selected from the group consisting of:
[0024] (i) a TAD1 polypeptide having at least 80% identity and/or an e-value≤0.05 to an amino acid sequence selected from the group consisting of SEQ ID NO: 22 and 323-577, and wherein expression of the TAD1 polypeptide in a B. subtilis BEST7003 comprising SEQ ID NO: 741 increases sensitivity of the B. subtilis BEST7003 to infection by at least one B. subtilis phage selected from the group consisting of SBSphiJ, SBSphiJ1, SBSphiJ2, SBSphiJ3, SBSphiJ4, SBSphiJ5 and SBSphiJ6;
[0025] (ii) a HAD1 polypeptide having at least 80% identity and/or an e-value≤0.05 to an amino acid sequence selected from the group consisting of SEQ ID NO: 32 and 595-610, and wherein expression of the HAD1 polypeptide in a B. subtilis BEST7003 comprising SEQ ID NO: 742 increases sensitivity of the B. subtilis BEST7003 to infection by at least one B. subtilis phage selected from the group consisting of SBSphiJ, SBSphiJ1, SBSphiJ2, SBSphiJ3, SBSphiJ5, SBSphiJ6 and SBSphiJ7;
[0026] (iii) a GAD1 polypeptide having at least 80% identity and/or an e-value≤0.05 to an amino acid sequence selected from the group consisting of SEQ ID NO: 33 and 675-737, and wherein expression of the GAD1 polypeptide in a B. subtilis BEST7003 comprising SEQ ID NO: 740 increases sensitivity of the B. subtilis BEST7003 to infection by at least one B. subtilis phage selected from the group consisting of SpBeta, SpBetaL6, SpBetaL7, SpBetaL8;
[0027] (iv) a DSAD1 polypeptide having at least 80% identity and/or an e-value≤0.05 to SEQ ID NO: 739, and wherein expression of the DSAD1 polypeptide in a B. subtilis BEST7003 comprising SEQ ID NO: 746 increases sensitivity of the B. subtilis BEST7003 to infection by a B. subtilis phage SPR; and
[0028] (v) a TAD2 polypeptide having at least 80% identity and/or an e-value≤0.05 to an amino acid sequence selected from the group consisting of SEQ ID NO: 1046-1295, and wherein expression of the TAD2 polypeptide in a B. subtilis BEST7003 comprising SEQ ID NO: 741 or 1300 increases sensitivity of the B. subtilis BEST7003 to infection by at least one B. subtilis phage selected from the group consisting of SPO1L1, SPO1L2, SPO1L4 and SPO1L5; and a nucleic acid sequence heterologous to the polynucleotide which facilitates expression and/or integration of the polynucleotide in a phage genome.

[0029] According to an aspect of some embodiments of the present invention there is provided a nucleic acid construct comprising a polynucleotide encoding an anti-defense polypeptide selected from the group consisting of:
[0030] (i) a TAD1 polypeptide having at least 80% identity and/or an e-value≤0.05 to an amino acid sequence selected from the group consisting of SEQ ID NO: 22 and 323-577, and wherein expression of the TAD1 polypeptide in a B. subtilis BEST7003 comprising SEQ ID NO: 741 increases sensitivity of the B. subtilis BEST7003 to infection by at least one B. subtilis phage selected from the group consisting of SBSphiJ, SBSphiJ1, SBSphiJ2, SBSphiJ3, SBSphiJ4, SBSphiJ5 and SBSphiJ6;
[0031] (ii) a HAD1 polypeptide having at least 80% identity and/or an e-value≤0.05 to an amino acid sequence selected from the group consisting of SEQ ID NO: 32 and 595-610, and wherein expression of the HAD1 polypeptide in a B. subtilis BEST7003 comprising SEQ ID NO: 742 increases sensitivity of the B. subtilis BEST7003 to infection by at least one B. subtilis phage selected from the group consisting of SBSphiJ, SBSphiJ1, SBSphiJ2, SBSphiJ3, SBSphiJ5, SBSphiJ6 and SBSphiJ7;
[0032] (iii) a GAD1 polypeptide having at least 80% identity and/or an e-value≤0.05 to an amino acid sequence selected from the group consisting of SEQ ID NO: 33 and 675-737, and wherein expression of the GAD1 polypeptide in a B. subtilis BEST7003 comprising SEQ ID NO: 740 increases sensitivity of the B. subtilis BEST7003 to infection by at least one B. subtilis phage selected from the group consisting of SpBeta, SpBetaL6, SpBetaL7, SpBetaL8; and
[0033] (iv) a DSAD1 polypeptide having at least 80% identity and/or an e-value≤0.05 to SEQ ID NO: 739, and wherein expression of the DSAD1 polypeptide in a B. subtilis BEST7003 comprising SEQ ID NO: 746 increases sensitivity of the B. subtilis BEST7003 to infection by a B. subtilis phage SPR;
   and a nucleic acid sequence heterologous to the polynucleotide which facilitates expression and/or integration of the polynucleotide in a phage genome.

[0034] According to some embodiments of the invention, the nucleic acid sequence is selected from the group consisting of: a promoter, a recombination element, an element for expression of multiple polynucleotides from a single construct, a transmissible element and a selectable marker.

[0035] According to some embodiments of the invention, the at least 80% is at least 90%.

[0036] According to some embodiments of the invention, the polynucleotide comprises the SEQ ID NO.

[0037] According to some embodiments of the invention:
[0038] the amino acid sequence of (i) is selected from the group consisting of SEQ ID NO: 22, 324, 337, 338, 345, 400, 404, 438, 460, 464 and 543;
[0039] the amino acid sequence of (ii) is selected from the group consisting of SEQ ID NO: 32, 598, 604, 607 and 609;
[0040] the amino acid sequence of (iii) is selected from the group consisting of SEQ ID NO: 33, 689, 723, 725 and 726; and/or the amino acid sequence of (v) is selected from the group consisting of SEQ ID NO: 1046-1051.

[0041] According to some embodiments of the invention:
[0042] the amino acid sequence of (i) is selected from the group consisting of SEQ ID NO: 22, 324, 337, 338, 345, 400, 404, 438, 460, 464 and 543;
[0043] the amino acid sequence of (ii) is selected from the group consisting of SEQ ID NO: 32, 598, 604, 607 and 609; and/or
[0044] the amino acid sequence of (iii) is selected from the group consisting of SEQ ID NO: 33, 689, 723, 725 and 726.

[0045] According to an aspect of some embodiments of the present invention there is provided a method of producing a phage, the method comprising contacting the phage with the nucleic acid construct, under conditions which allow integration of the polynucleotide in a genome of the phage, thereby producing the phage.

[0046] According to some embodiments of the invention, the phage does not endogenously express the anti-defense system polypeptide.

[0047] According to an aspect of some embodiments of the present invention there is provided a method of infecting a bacteria, the method comprising contacting the bacteria with the genetically modified phage, thereby infecting the bacteria.

[0048] According to some embodiments of the invention, the contacting is effected in-vitro or ex-vivo.

[0049] According to some embodiments of the invention, the contacting is effected in-vivo.

[0050] According to an aspect of some embodiments of the present invention there is provided a method of treating a bacterial infection in a subject in need thereof, the method comprising administering to the subject a therapeutically effective amount of a phage comprising a polynucleotide encoding an anti-defense system polypeptide, thereby treating the bacterial infection in the subject.

[0051] According to some embodiments of the invention, the method comprising administering to the subject a therapeutically effective amount of an antibiotic.

[0052] According to an aspect of some embodiments of the present invention there is provided a phage comprising a polynucleotide encoding an anti-defense system polypeptide, for use in treating a bacterial infection in the subject in need thereof.

[0053] According to some embodiments of the invention, the phage further comprising an antibiotic.

[0054] According to an aspect of some embodiments of the present invention there is provided an article of manufacture comprising as active ingredients a phage comprising a polynucleotide encoding an anti-defense system polypeptide; and an antibiotic.

[0055] According to some embodiments of the invention, the phage and the antibiotic are in separate formulations.

[0056] According to some embodiments of the invention, the phage and the antibiotic are in a co-formulation.

[0057] According to some embodiments of the invention, the anti-defense system polypeptide is selected from the group consisting of:
[0058] (i) a TAD1 polypeptide having at least 80% identity and/or an e-value≤0.05 to an amino acid sequence selected from the group consisting of SEQ ID NO: 22 and 323-577, and wherein expression of the TAD1 polypeptide in a B. subtilis BEST7003 comprising SEQ ID NO: 741 increases sensitivity of the B. subtilis BEST7003 to infection by at least one B. subtilis phage selected from the group consisting of SBSphiJ, SBSphiJ1, SBSphiJ2, SBSphiJ3, SBSphiJ4, SBSphiJ5 and SBSphiJ6;
[0059] (ii) a HAD1 polypeptide having at least 80% identity and/or an e-value≤0.05 to an amino acid sequence selected from the group consisting of SEQ ID NO: 32 and 595-610, and wherein expression of the HAD1 polypeptide in a B. subtilis BEST7003 comprising SEQ ID NO: 742 increases sensitivity of the B. subtilis BEST7003 to infection by at least one B. subtilis phage selected from the group consisting of SBSphiJ, SBSphiJ1, SBSphiJ2, SBSphiJ3, SBSphiJ5, SBSphiJ6 and SBSphiJ7;
[0060] (iii) a GAD1 polypeptide having at least 80% identity and/or an e-value≤0.05 to an amino acid sequence selected from the group consisting of SEQ ID NO: 33 and 675-737, and wherein expression of the GAD1 polypeptide in a B. subtilis BEST7003 comprising SEQ ID NO: 740 increases sensitivity of the B. subtilis BEST7003 to infection by at least one B. subtilis phage selected from the group consisting of SpBeta, SpBetaL6, SpBetaL7, SpBetaL8;
[0061] (iv) a DSAD1 polypeptide having at least 80% identity and/or an e-value≤0.05 to SEQ ID NO: 739, and wherein expression of the DSAD1 polypeptide in a B. subtilis BEST7003 comprising SEQ ID NO: 746 increases sensitivity of the B. subtilis BEST7003 to infection by a B. subtilis phage SPR; and
[0062] (v) a TAD2 polypeptide having at least 80% identity and/or an e-value≤0.05 to an amino acid sequence selected from the group consisting of SEQ ID NO: 1046-1295, and wherein expression of the TAD2 polypeptide in a B. subtilis BEST7003 comprising SEQ ID NO: 741 or 1300 increases sensitivity of the B. subtilis BEST7003 to infection by at least one B. subtilis phage selected from the group consisting of SPO1L1, SPO1L2, SPO1L4 and SPO1L5.

[0063] According to some embodiments of the invention, the anti-defense polypeptide is selected from the group consisting of:
[0064] (i) a TAD1 polypeptide having at least 80% identity and/or an e-value≤0.05 to an amino acid sequence selected from the group consisting of SEQ ID NO: 22 and 323-577, and wherein expression of the TAD1 polypeptide in a B. subtilis BEST7003 comprising SEQ ID NO: 741 increases sensitivity of the B. subtilis BEST7003 to infection by at least one B. subtilis phage selected from the group consisting of SBSphiJ, SBSphiJ1, SBSphiJ2, SBSphiJ3, SBSphiJ4, SBSphiJ5 and SBSphiJ6;
[0065] (ii) a HAD1 polypeptide having at least 80% identity and/or an e-value≤0.05 to an amino acid sequence selected from the group consisting of SEQ ID NO: 32 and 595-610, and wherein expression of the HAD1 polypeptide in a B. subtilis BEST7003 comprising SEQ ID NO: 742 increases sensitivity of the B. subtilis BEST7003 to infection by at least one B. subtilis phage selected from the group consisting of SBSphiJ, SBSphiJ1, SBSphiJ2, SBSphiJ3, SBSphiJ5, SBSphiJ6 and SBSphiJ7;
[0066] (iii) a GAD1 polypeptide having at least 80% identity and/or an e-value≤0.05 to an amino acid sequence selected from the group consisting of SEQ ID NO: 33 and 675-737, and wherein expression of the GAD1 polypeptide in a B. subtilis BEST7003 comprising SEQ ID NO: 740 increases sensitivity of the B. subtilis BEST7003 to infection by at least one B. subtilis phage selected from the group consisting of SpBeta, SpBetaL6, SpBetaL7, SpBetaL8; and
[0067] (iv) a DSAD1 polypeptide having at least 80% identity and/or an e-value≤0.05 to SEQ ID NO: 739, and wherein expression of the DSAD1 polypeptide in a B. subtilis BEST7003 comprising SEQ ID NO: 746 increases sensitivity of the B. subtilis BEST7003 to infection by a B. subtilis phage SPR.

[0068] According to some embodiments of the invention, the phage is the genetically modified phage.

[0069] According to some embodiments of the invention, the bacteria is selected from the group consisting of E. coli, P. aeruginosa, K. pneumoniae and C. difficile.

[0070] Unless otherwise defined, all technical and/or scientific terms used herein have the same meaning as commonly understood by one of ordinary skill in the art to which the invention pertains. Although methods and materials similar or equivalent to those described herein can be used in the practice or testing of embodiments of the invention, exemplary methods and/or materials are described below. In case of conflict, the patent specification, including definitions, will control. In addition, the materials, methods, and examples are illustrative only and are not intended to be necessarily limiting.

### BRIEF DESCRIPTION OF THE SEVERAL VIEWS OF THE DRAWINGS

[0071] Some embodiments of the invention are herein described, by way of example only, with reference to the accompanying drawings. With specific reference now to the drawings in detail, it is stressed that the particulars shown are by way of example and for purposes of illustrative discussion of embodiments of the invention. In this regard, the description taken with the drawings makes apparent to those skilled in the art how embodiments of the invention may be practiced.

[0072] In the drawings:

[0073] FIGS. 1A-C demonstrate the principles of identification of anti-defense genes based on phage infection and genome analyses. FIG. 1A is a schematic flowchart of the experimental and analytical protocols used. FIG. 1B shows genome comparison of eight phages from the SBSphiJ group. Sequence similarity between genes is marked by grey shading. FIG. 1C shows infection profile of SBSphiJ-like and SpBeta-like phages infecting five Bacillus subtilis strains that express each of the defense systems Thoeris (specifically, from Bacillus cereus MSX-D12), Hachiman, Gabija, Septu and Lamassu. Fold defense was measured using serial dilution plaque assays, comparing the efficiency of plating (EOP) of phages on the system-containing strain to the EOP on a control strain that lacks the systems and contains an empty vector instead. Data represent an average of three replicates. Detailed data from individual plaque assays is found in FIGS. 10A-B.

[0074] FIGS. 2A-E demonstrate that TAD1 proteins inhibit Thoeris defense system. FIG. 2A is a schematic representation of the TAD1 locus in SBSphiJ7. Shown in the locus for two other phages, SBSphi3 and SBSphi4, in which endogenous TAD1 is missing. The coordinates of the presented locus within the phage genome are indicated below the name of each phage. FIG. 2B demonstrates that TAD1 cancels Thoeris-mediated defense. Results of phage infection experiments with eight phages of the SBSphiJ family. Data represent plaque-forming units per ml (PFU/ml) of phages infecting control cells (“no system”), cells expressing the Thoeris system (“Thoeris”), and cells expressing the Thoeris system and the TAD1 gene from SBSphiJ7 (“Thoeris+TAD1”). Nucleic acid and amino acid sequences of Thoeris are provided in SEQ ID NO: 741 and 1296-1297, nucleic acid and amino acid sequences of TAD1 are provided in SEQ ID Nos: 5 and 22. All phages except for SBSphiJ7 lack an endogenous TAD1. Data for phage SBSphiJ7 in which TAD1 was engineered under the control of its native promoter are also presented. Shown is the average of three replicates, with individual data points overlaid. FIG. 2C shows that TAD1 knockdown cancels anti-Thoeris activity. Results of phage SBSphiJ7 infection experiments. Data represent plaque-forming units per ml (PFU/ml) of SBSphiJ7 infecting cells expressing Thoeris and a dCAS9 system targeting TAD1, as well as control cells. Shown is the average of three replicates, with individual data points overlaid. FIG. 2D shows phylogenetic analysis of TAD1 homologs in phage and prophage genomes. The names of bacteria in which TAD1 homologs were found in prophages and tested experimentally are indicated on the tree. FIG. 2E demonstrates that TAD1 homologs (nucleic acid sequences of the TAD1 homologs are provided in SEQ ID NOs: 49, 94 and 188, amino acid sequences of the TAD1 homologs are provided in SEQ ID Nos: 438, 460 and 464) found in multiple prophages can inhibit the Thoeris system in B. subtilis. Results are representative of three replicates.

[0075] FIGS. 3A-D demonstrate that HAD1 proteins inhibit the Hachiman defense system. FIG. 3A is a schematic representation of the comparison of the genomic locus of HAD1 between SBSphiJ4 (contains an endogenous HAD1); and SBSphiJ5 and SBSphiJ7 (lack endogenous HAD1). FIG. 3B demonstrates that HAD1 cancels Hachiman-mediated defense. Results of phage infection experiments with eight phages of the SBSphiJ family. Data represent plaque-forming units per ml (PFU/ml) of phages infecting control cells (“no system”), cells expressing the Hachiman system (“Hachimen”), and cells expressing a Hachiman system and the HAD1 gene from SBSphiJ4 (“Hachimen+HAD1”). Nucleic acid and amino acid sequences of Hachimen are provided in SEQ ID NO: 742 and 1298-1299, nucleic acid and amino acid sequences of HAD1 are provided in SEQ ID Nos: 15 and 32. All phages except for SBSphiJ4 lack endogenous HAD1. Shown is the average of three replicates, with individual data points overlaid. FIG. 3C shows that HAD1 knockdown cancels anti-Hachiman activity. Results of phage SBSphiJ4 infection experiments. Data represent plaque-forming units per ml (PFU/ml) of SBSphiJ4 infecting cells expressing Hachiman and a dCAS9 system targeting HAD1, as well as control cells. Shown is the average of three replicates, with individual data points overlaid. FIG. 3D shows cladogram and multiple sequence alignment of HAD1 homologs. Conserved residues are colored in grey.

[0076] FIGS. 3E-G demonstrate that GAD1 proteins inhibit Gabija defense system. FIG. 3E is a schematic representation of the genomic locus of the anti-Gabija gene GAD1 (nucleic acid sequence provided in SEQ ID NO: 16, amino acid sequence provided in SEQ ID NO: 33) in multiple phages of the SpBeta group. FIG. 3F demonstrates that deletion of GAD1 from phage phi3T eliminates the ability of the phage to overcome the Gabija-mediated defense. FIG. 3G shows phylogeny and distribution of GAD1 homologs.

[0077] FIGS. 4A-D demonstrate that TAD1 cancels Thoeris-mediated defense by physically binding and sequestering the Thoeris-derived signaling molecule. FIG. 4A demonstrates that filtered lysates derived from cells expressing ThsB and TAD1 fail to activate ThsA in vitro. Results show NADase activity of purified ThsA protein incubated with filtered lysates derived from control cells, ThsB-expressing cells, or cells expressing both ThsB and TAD1, that were infected by phage SBSphiJ at MOI of 5. Lysates were collected at multiple time points following infection. NADase activity was calculated as the rate of change in εNAD+ fluorescence, due to εNAD+ hydrolysis, during the linear phase of the reaction. Bars represent the mean of three experiments, with individual data points overlaid. FIG. 4B demonstrates that the signaling molecule (v-cADPR) is eliminated by TAD1 in-vivo. Results show the peak (intensity) of the v-cADPR measured in LC-MS analysis of filtrates derived from cells right before and 120 minutes after infection with phage SBSphiJ. FIG. 4C demonstrate that TAD1 eliminate the signaling molecule rather than inhibiting its' production. Results show NADase activity of purified ThsA protein incubated with filtered lysates derived from ThsB-expressing cells 120 minutes post infection with phage SBSphiJ. Filtered lysates were either pre-incubated with TAD1 for 10 minutes in vitro (“with TAD1”) or with buffer (“W/O TAD1”). Control are filtered lysates from infected cells not expressing ThsB. NADase activity calculated and presented as in panel A. FIG. 4D demonstrates that TAD1 cancels Thoeris-mediated defense by binding to the signaling molecule rather than degrading it. Results show NADase activity of purified ThsA protein incubated with filtered lysates derived from infected cells expressing ThsB, that were additionally pre-incubated with TAD1 in vitro for 10 minutes, followed by an additional incubation of 5 minutes at either 25° C. or 85° C. (denaturing conditions). “With TAD1”, lysates pre-incubated with TAD1. “W/O TAD1”, lysates incubated by buffer instead of TAD1. “Control”, lysates derived from infected cells that do not express ThsB.

[0078] FIGS. 5A-E demonstrate that DSR2 defense system protects bacteria via depletion of NAD⁺. FIG. 5A is a schematic representation of domain organization of a DSR2 gene from B. subtilis 29R. Protein accession in NCBI is indicated above the gene. FIG. 5B demonstrates the efficiency of plating for the indicated three phages infecting a control B. subtilis strain BEST7003 which has an empty vector (“no system”) as compared to B. subtilis strain BEST7003 with cloned wild type DSR2 from B. subtilis 29R (“DSR2”) or the indicated mutant DSR2 versions. The Data represent plaque-forming units (PFU) per milliliter; bar graph represents average of three independent replicates, with individual data points overlaid. FIG. 5C shows growth curves in liquid culture for B. subtilis BEST7003 bacteria that contain exogenous DSR2 compared to control empty vector bacteria, infected by phage SPR at 30° C. Bacteria were infected at time 0 at an MOI of 0.04 or 4. Y axis represents bacterial density, as measured by optical density at a wavelength of 600 nm. Three independent replicates are shown for each MOI, and each curve shows an individual replicate. FIG. 5D-E demonstrate concentrations of NAD (FIG. 5D) and ADPR (FIG. 5E) in cell lysates extracted from SPR-infected cells as measured by targeted LC-MS with synthesized standards. X-axis represents minutes post infection, with zero representing non-infected cells. Cells were infected by phage SPR at an MOI of 4 at 30° C. Each panel shows data acquired for B. subtilis BEST7003 bacteria cloned with exogenous DSR2, the indicated mutants or control empty vector. Bar graphs represent the average of two biological replicates, with individual data points overlaid.

[0079] FIGS. 6A-D demonstrates that phage mating reveals phage that activate or repress DSR2. FIG. 6A shows the genes of SPR, SPBeta and Phi3T aligned based on amino acids sequence homology. Grey bands connect homologous genes. FIG. 6B is a schematic representation of the phage mating experiment. B. subtilis BEST7003 expressing both DSR2 and pVip is co-infected with phage SPR and SPbeta (or phi3T). Recombination between co-infecting phage genomes leads to hybrid phages that can overcome both defense systems, and generate plaques. Examination of the genomes of multiple hybrids predicts genomic regions necessary to overcome defense. FIG. 6C shows Plaque assays with single and double phages. Cells expressing both DSR2 and pVip are infected either with phage SPR (left), phage SPbeta (middle) or both phages (right). Each phage was added at a titer of 10⁷ pfu/ml. In FIG. 6D each horizontal line represents a hybrid phage that can overcome DSR2. Shades of gray differentiate between areas from SPR, SPbeta, or phi3T. Representative non-redundant hybrid sequences are presented out of 31 sequenced hybrids. Rectangles outline two areas that are predicted to allow the phage to overcome DSR2 defense. Top zoom inset shows genes found in the region acquired from phi3T or SPbeta. Bottom zoom inset shows genes present in the original SPR genome.

[0080] FIG. 7 demonstrates that the pVip gene protects bacteria against phages phi3T and SPbeta, but not from SPR. The efficiency of plating is shown for the three phages infecting the control B. subtilis BEST7003 strain which has an empty vector (“no system”) or a strain with cloned pVip. Data represent plaque-forming units (PFU) per milliliter; bar graph represents average of three independent replicates, with individual data points overlaid.

[0081] FIGS. 8A-G demonstrate that DSAD1 inhibits DSR2 defense system and phage tail tube protein activates DSR2. FIG. 8A shows growth curves in liquid culture for B. subtilis BEST7003 bacteria that express exogenous DSR2, bacteria that co-express DSR2 and DSAD1, and negative control bacteria cloned with an empty vector, infected by phage SPR at 30° C. Nucleic acid and amino acid sequences of DSR2 are provided in SEQ ID NOs: 746 and 753, nucleic acid and amino acid sequences of DSAD1 are provided in SEQ ID Nos: 738 and 739. Bacteria were infected at time 0 at an MOI of 0.04. Three independent replicates are shown for each MOI, and each curve shows an individual replicate. FIG. 8B shows pulldown assays of the DSR2-DSAD1 and DSR2-tail tube complex. DSAD1 and tail-tube proteins were tagged with streptavidin in the C-terminus. In this experiment, DSR2 was mutated (H171A) to avoid toxicity. Cell lysates were ran on SDS page gel after streptavidin affinity purification. Lane A, E. coli MG1655 cells expressing DSR2. Lane B, E. coli MG1655 cells expressing DSAD1 with tag. Lane C, E. coli MG1655 cells expressing tail-tube with tag. Lane D, E. coli MG1655 cells co-expressing DSR2 and DSAD1 with tag. Lane E, E. coli MG1655 cells co-expressing DSR2 and tail-tube with tag. FIG. 8C shows transformation efficiency measured for B. subtilis BEST7003 cells containing wild type or mutated DSR2, with a vector containing the tail-tube protein. As a control, a vector containing GFP was used to transform cells containing DSR2. Y-axis represents the number of colony forming units per milliliter. X-axis shows the different strains being transformed. FIG. 8D shows liquid culture growth of E. coli bacteria that contain DSR2 and the phage tail-tube protein, each under the control of an inducible promoter, and control E. coli that contain inducible GFP and DSR2 protein. Expression was induced at time 0 by adding 0.2% arabinose (for the tail-tube protein) and 1 mM IPTG (for DSR2). Three independent replicates are shown, and each curve shows an individual replicate. FIGS. 8E-F show concentrations of NAD (FIG. 8E) and ADPR (FIG. 8F) in cell cells lysates extracted from induced E. coli MG1655 cells as measured by targeted LC-MS with synthesized standards. X-axis represents minutes post induction, with zero representing non-induced cells. Expression was induced by 0.2% arabinose and 1 mM IPTG at 37° C. Each panel shows data acquired for cells expressing DSR2 and tail-tube protein or for control cells that express GFP and DSR2 protein. Bar graphs represent the average of two biological replicates, with individual data points overlaid. FIG. 8G is a model for the mechanism of action of DSR2. Phage infection is sensed by the recognition of phage tail-tube protein through direct binding to DSR2. This triggers the enzymatic activity of the SIR2 domain to deplete the cell of NAD+ and lead to abortive infection. The phage anti-DSR2 protein DSAD1 inhibits DSR2 by direct binding.

[0082] FIG. 9 shows genome comparison of eleven phages from the SpBeta group. Sequence similarity between genes is marked by grey shading.

[0083] FIGS. 10A-B show results of phage infection experiments with eight phages of the SBSphiJ family (FIG. 10A) and eleven phages of the SpBeta family (FIG. 10B). Data represent plaque-forming units per ml (PFU/ml) of phages infecting control cells (“no system”), and cells infecting strains expressing each one of the examined defense systems. Shown is the average of three replicates, with individual data points overlaid.

[0084] FIGS. 11A-B demonstrate that the TAD1 homologs inhibit Thoeris defense. FIG. 11A shows multiple sequence alignment of the 10 TAD1 homologs that were experimentally verified (nucleic acid sequences of the TAD1 homologs are provided in SEQ ID Nos: 321, 269, 281, 282, 85, 53, 49, 94, 188 and 174, amino acid sequences of the TAD1 homologs are provided in SEQ ID Nos: 324, 337, 338, 345, 400, 404, 438, 460, 464 and 543). Conserved residues are colored in grey. FIG. 11B shows results of phage infection experiments with eight phages of the SBSphiJ family. Data represent plaque-forming units per ml (PFU/ml) of phages infecting control cells (“no system”), cells expressing the Thoeris system (“Thoeris”), and cells expressing the Thoeris system and a TAD1 homolog. All phages except for SBSphiJ7 lack endogenous TAD1. Shown is the average of three replicates, with individual data points overlaid.

[0085] FIGS. 12A-D demonstrate that the HAD1/GAD1 homologs inhibit defense of the respective defense system. FIG. 12A shows multiple sequence alignment of the 5 HAD1 homologs that were chosen to be tested experimentally (nucleic acid sequences of the HAD1 homologs are provided in SEQ ID Nos: 581, 578, 588 and 593, amino acid sequences of the HAD1 homologs are provided in SEQ ID Nos: 598, 604, 607 and 609). Conserved residues are colored in grey. FIG. 12B shows results of phage infection experiments with eight phages of the SBSphiJ family. Data represent plaque-forming units per ml (PFU/ml) of phages infecting control cells (“no system”), cells expressing the Hachiman system (“Hachiman”), and cells expressing the Hachiman system and a HAD1 homolog. All phages except for SBSphiJ4 lack endogenous HAD1. Shown is the average of three replicates, with individual data points overlaid. FIG. 12C shows multiple sequence alignment of the 5 GAD1 homologs that were chosen to be tested experimentally (nucleic acid sequences of the GAD1 homologs are provided in SEQ ID Nos: 617, 645, 647 and 644, amino acid sequences of the GAD1 homologs are provided in SEQ ID Nos: 689, 723, 725 and 726). Conserved residues are colored in grey. FIG. 12D shows results of phage infection experiments with eleven phages of the SpBeta family. Data represent plaque-forming units per ml (PFU/ml) of phages infecting control cells (“no system”), cells expressing the Gabija system (“Gabija”), and cells expressing the Gabija system and a GAD1 homolog. Shown is the average of three replicates, with individual data points overlaid.

[0086] FIG. 13 demonstrates that TAD1 does not form a physical contact with ThsA or ThsB. Cell lysates were run on SDS page gel. Results show that His-tagged TAD1 protein does not pull down ThsA/ThsB. Left lane—cells expressing His-TAD1, center lane—cells expressing His-TAD1 and Thoeris (ThsA/B), right lane—cells expressing Thoeris (ThsA/B).

[0087] FIGS. 14A-B demonstrate that TAD2 inhibit Thoeris defense system. FIG. 14A demonstrates the differential defense of Thoeris against SPO1-like phages and the anti-Thoeris activity of TAD2. Data represent plaque-forming units per milliliter (PFU ml⁻¹) of phages infecting control cells (“no system”), cells expressing the Thoeris system (“Thoeris”) and cells co-expressing the Thoeris system and the TAD2 gene from SPO1 (“Thoeris+Tad2”). Nucleic acid and amino acid sequences of Thoeris are provided in SEQ ID NO: 741 and 1296-1297, nucleic acid and amino acid sequences of TAD2 are provided in SEQ ID Nos: 757 and 1046. All phages except for SPO1 and SPO1L3 lack an endogenous TAD2. Shown is the average of three replicates, with individual data points overlaid. FIG. 14B demonstrates that TAD2 knockdown cancels the anti-Thoeris activity, as determined by phage SPO1 infection experiments. Data represent plaque-forming units per ml (PFU/ml) of SPO1 infecting cells expressing Thoeris and a dCAS9 system targeting TAD2, as well as control cells. Shown is the average of three replicates, with individual data points overlaid.

[0088] FIG. 15 shows phylogenetic analysis of TAD2 homologs in phage and prophage genomes. The tree is based on 250 non-redundant sequences.

[0089] FIG. 16 demonstrates that TAD2 homologs inhibit the Thoeris system in B. subtilis. Results of phage infection experiments with six phages of the SPO1 family. Data represent PFU/mL of phages infecting control cells without Thoeris, cells expressing the Thoeris system, and cells co-expressing the Thoeris system and a TAD2 homolog. Nucleic acid and amino acid sequences of Thoeris are provided in SEQ ID NO: 741 and 1296-1297, nucleic acid and amino acid sequences of TAD2 homologs are provided in SEQ ID Nos: 758-761 and 1047-1050. All phages except for SPO1 and SPO1L3 lack endogenous TAD2. Shown is the average of three replicates, with individual data points overlaid.

[0090] FIG. 17 demonstrates that TAD2 releases bound molecule when denatured. Shown is NADase activity of purified ThsA incubated with mediums containing 900 nM of the Thoeris immune signaling molecule, that were additionally pre-incubated with purified TAD2 in vitro for 10 minutes, followed by an additional incubation of 5 minutes at either 25° C. or 95° C. “24 μM Tad2”—mediums pre-incubated with TAD2; “No Tad2”—mediums incubated with buffer instead of Tad2; “Control”—mediums not containing the Thoeris immune signaling molecule.

[0091] FIG. 18 demonstrates that TAD2 from a prophage integrated into Myroides odoratus XSfan inhibits the Thoeris defense system from Bacillus amyloliquefaciens Y2. Shown are tenfold serial dilution plaque assays with nine phages of the SBSphiJ family, infecting control B. subtilis cells without Thoeris, B. subtilis cells expressing the Thoeris system from Bacillus amyloliquefaciens Y2, and B. subtilis cells coexpressing the Thoeris system from Bacillus amyloliquefaciens Y2 and a Tad2 homolog from a prophage integrated into Myroides odoratus XSfan. Nucleic acid and amino acid sequences of Thoeris are provided in SEQ ID NO: 1300 and 1301-1302, nucleic acid and amino acid sequences of the TAD2 homolog are provided in SEQ ID Nos: 762 and 1051.

### DESCRIPTION OF SPECIFIC EMBODIMENTS OF THE INVENTION

[0092] The present invention, in some embodiments thereof, relates to genetically modified phages and used thereof.

[0093] Before explaining at least one embodiment of the invention in detail, it is to be understood that the invention is not necessarily limited in its application to the details set forth in the following description or exemplified by the Examples. The invention is capable of other embodiments or of being practiced or carried out in various ways.

[0094] The evolutionary pressure imposed by phage predation on bacteria has resulted in the development of both anti-phage bacterial defense systems and counter-resistance mechanisms developed by phages that allow them to overcome bacterial defenses. Properly formulated and applied phages or their defense mechanisms have sufficient potential to cure bacterial infections.

[0095] Whilst conceiving embodiments of the invention, the present inventors have now uncovered that phages encode an arsenal of anti-defense proteins that can disable a wide variety of bacterial defense mechanisms and increase sensitivity of bacteria to phage infection.

[0096] Specifically, as is illustrated hereinunder and in the examples section which follows, by comparing genomically-similar Bacillus phages that showed differential sensitivity to bacterial defense systems, the present inventors identified five families of anti-defense proteins that inhibit the previously described Thoeris, Hachiman, Gabija and DSR2 bacterial defense systems (Examples 1-6). Homologs of these anti-defense proteins were found in hundreds of phages that infect taxonomically diverse bacterial species, and by cloning such homologs into Bacillus subtilis cells that express Thoeris, Hachiman, Gabija or DSR2 bacterial defense system, the present inventors show that they efficiently cancel the respective defensive activity (Examples 2-6). Additionally or alternatively, knocking out the anti-defense protein or homolog from the phage genome abrogated the phage ability to overcome the bacterial defense system (Examples 4 and 6).

[0097] Consequently, specific embodiments of the present teachings suggest genetically modified phages comprising a polynucleotide encoding these anti-defense proteins for use in combatting bacterial infections/contaminations.

[0098] Thus, according to an aspect of the present invention, there is provided a genetically modified phage comprising a polynucleotide encoding an anti-defense system polypeptide.

[0099] As used herein, the term “phage” or “bacteriophage” refers to a virus that selectively infects one or more bacterial species. Many phages are specific to a particular genus or species or strain of bacteria. According to specific embodiments, the phage genome can be ssDNA or dsDNA. According to specific embodiments, the phage genome can be ssRNA or dsRNA.

[0100] Typically, a phage will be characterized by: 1) the nature of the nucleic acids that make up its genome, e.g., DNA, RNA, single-stranded or double-stranded; 2) the nature of its infectivity, e.g., lytic or temperate; and 3) the particular bacterial species that it infects (and in certain instances the particular subspecies or strain). This is known as “host range”.

[0101] According to some embodiments, the phage is a lytic phage.

[0102] The term “lytic phage” refers to a phage that infects a bacterial host and causes that host to lyse without incorporating the phage nucleic acids into the host genome. A lytic phage is typically not capable of reproducing using the lysogenic cycle.

[0103] According to other embodiments, the phage is temperate (also referred to as lysogenic).

[0104] The term “temperate phage” refers to a phage that is capable of reproducing using both the lysogenic cycle and the lytic cycle. Lysogeny is characterized by integration of the bacteriophage nucleic acid into the host bacterium's genome or formation of a circular replicon in the bacterial cytoplasm.

[0105] According to specific embodiments, phages that infect bacteria that are pathogenic to plants and/or animals (including humans) find particular use.

[0106] Exemplary phages which fall under the scope of some embodiments of the invention include, but are not limited to, phages that belong to any of the following virus families: Corticoviridae, Cystoviridae, Inoviridae, Leviviridae, Microviridae, Myoviridae, Podoviridae, Siphoviridae, or Tectiviridae.

[0107] According to specific embodiments, the phage is selected from the phages listed in Tables 5-10 hereinbelow.]

[0108] According to specific embodiments, the phage is isolated and/or developed to target a specific bacteria. Isolation and characterization of such phages can be done, for example, as described in Hayman Pharmaceuticals (Basel) (2019) 12(1): 35, DOI: 10.3390/ph12010035 and www(dot)doi.org/10.1016/j.cels.2015.08.013, the contents of which are fully incorporated herein by reference.

[0109] According to specific embodiments, the phage infects a pathogenic bacteria (i.e. a bacteria that can cause or be associated with a disease in humans, livestock, crops, or other living organism).

[0110] According to specific embodiments, the phage is a clinically approved phage.

[0111] According to specific embodiments, the phage is FDA approved for treatment of an infectious bacterium.

[0112] The phage of some embodiments of the invention is genetically modified.

[0113] Hence, the phages of some embodiments of the invention comprise a heterologous nucleic acid sequence or residue.

[0114] The term “heterologous” as used herein, refers to a nucleic acid sequence or residue which is not native to the phage at least in localization or is completely absent from the native genomic sequence of the phage.

[0115] Methods of genetically modifying a phage are well known in the art and described in e.g. Gibb et al. (2021) Pharmaceuticals, 14, 634; Chen et al. (2019) Front, Microbiol, 10:954; and Rustad, et al. (2018) Synthetic Biology, 3(1) ysy002, doidotorg/10.1093/synbio/ysy002, the contents of which are fully incorporated herein by reference, and are further described hereinbelow and in the Examples section which follows. Non-limiting Examples include, homologous recombination, bacteriophage recombineering of electroporated DNA (BRED), CRISPRZ-Cas-based phage engineering and rebooting phages using assembled phage genomic DNA.

[0116] One Exemplary method of obtaining the genetically modified phage is by recombination-mediated genetic exchange between at least 2 distinct phages, as further described in the Examples section which follows which serve as an integral part of the specification of the instant application.

[0117] Thus, according to specific embodiments, the phage comprises genomic segments of a distinct phage integrated in a genome of said phage.

[0118] According to specific embodiments, these segments are about 1000-60,000, 2000-50,000 or 10,000-30, 000 long.

[0119] According to specific embodiments, these segments constitute about 0.5-50% of the phage genome.

[0120] According to specific embodiments, these segments constitute less than 40%, less than 30%, less than 20%, less than 10% of the phage genome.

[0121] According to specific embodiments, these segments constitute more than 1%, more than 5%, more than 10%, more than 20% of the phage genome.

[0122] According to specific embodiments, these segments constitute less than 1% of the phage genome.

[0123] The phage may be genetically engineered to change its host range, convert a temperate phage to a lytic phage, encode an anti-defense system polypeptide and the like.

[0124] According to specific embodiments, the genetically modified phage has an increased infectivity to at least one bacteria as compared to a non-genetically modified phage of the same species or strain.

[0125] As used herein, “increasing sensitivity” or “increased infectivity” refers to a significant increase in bacterial susceptibility towards a genetically modified phage, as compared to a non-genetically modified phage of the same species or strain, as may be manifested e.g. in growth arrest, death, integration of the phage nucleic acid sequence into the bacterial genome, prevention of lysogeny and/or phage genomic replication. According to a specific embodiment, the increase is in at least 5%, at least 10%, 20%, 30%, 40% or even higher say, 50%, 60%, 70%, 80%, 90% or more than 100%. According to specific embodiments the increase is at least 1.5 fold, at least 2 fold, at least 3 fold, at least 5 fold, at least 10 fold, or at least 20 fold.

[0126] Assays for testing phage sensitivity or infectivity are well known in the art, and are also described in the Examples section which follows. Thus, for example, the lysogenic activity of a phage can be assessed by PCR or DNA sequencing. The DNA replication activity of a phage can be assessed e.g. by DNA sequencing or southern blot analysis.

[0127] The lytic activity of a phage can be assessed e.g. by optical density, plaque assay or living dye indicators.

[0128] The lytic activity of a phage can be measured indirectly by following the decrease in optical density of the bacterial cultures owing to lysis. This method involves introduction of phage into a fluid bacterial culture medium. After a period of incubation, the phage lyses the bacteria in the broth culture resulting in a clearing of the fluid medium resulting in decrease in optical density.

[0129] Another method, known as the plaque assay, introduces phage into a few milliliters of soft agar along with some bacterial host cells. This soft agar mixture is laid over a hard agar base (seeded-agar overlay). The phage adsorbs onto the host bacterial cells, infect and lyse the cells, and then begin the process anew with other bacterial cells in the vicinity. After 6-24 hours, zones of clearing on the plate, known as plaques, are observable within the lawn of bacterial growth on the plate. Each plaque represents a single infective phage particle in the original sample.

[0130] Yet another method is the one-step phage growth curve which allows determining the production of progeny virions by cells as a function of time after infection. The assay is based on the fact that cells in the culture are infected simultaneously with a low number of phages so that no cell can be infected with more than one phage. At various time intervals, samples are removed for a plaque assay allowing quantitative determination of the number of phages present in the medium.

[0131] Other methods use for example redox chemistry, employing cell respiration as a universal reporter. During active growth of bacteria, cellular respiration reduces a dye (e.g., tetrazolium dye) and produces a color change that can be measured in an automated fashion. On the other hand, successful phage infection and subsequent growth of the phage in its host bacterium results in reduced bacterial growth and respiration and a concomitant reduction in color.

[0132] Non-limiting Examples of modifications that can be introduced to phage include genetic engineering of host-range-determining regions (HRDRs) in the tail fiber protein [see e.g. Yehl et al. Cell (2019) 179(2):459-469.e9 doi: 10.1016/j.cell.2019.09.015, the contents of which are fully incorporated herein by reference] or receptor-binding proteins [see e.g. Lenneman et al. Curr Opin Biotechnol (2021) 68:151-159 doi: 10.1016/j.copbio.2020.11.003, the contents of which are fully incorporated herein by reference].

[0133] The phages disclosed herein comprise a polynucleotide encoding an anti-defense system polypeptide.

[0134] According to specific embodiments, the polynucleotide encoding the anti-defense polypeptide is endogenous to the phage.

[0135] The term “endogenous” as used herein, refers to the expression of the native gene in its natural location and expression level in the genome of a phage.

[0136] According to other specific embodiments, the phage is devoid of an endogenous polynucleotide encoding the anti-defense polypeptide.

[0137] Thus, according to specific embodiments, the polynucleotide encoding the anti-defense polypeptide is heterologous to the phage.

[0138] As used herein, “anti-defense system polypeptide” refers to a polypeptide which expression in an infected bacteria disables an anti-phage bacterial defense system, thereby increasing sensitivity of the bacteria to a phage.

[0139] Numerous anti-phage bacterial defense systems are known in the art, including, but not limited to CRISPR-Cas, a restriction modification, toxin anti-toxin, BREX, DISARM, Thoeris, Hachiman, Gabija, DSR2, Septu and Lamassu systems (see e.g. Labrie et al Nature Reviews Microbiology 8, 317-327 (2010); Bernheim, A. & Sorek, R. Nat. Rev. Microbiol. 18, 113-119 (2020); Goldfarb et al. EMBO J. (2015) 34, 169-83; Doron, S. et al. Science 359, eaar4120 (2018); and International Application Publication Nos. WO2015/059690, WO2018142416 and WO2018/220616, the contents of which are fully incorporated herein by reference).

[0140] According to specific embodiments, the anti-phage bacterial defense system is not CRISPR-Cas, not a restriction modification system and/or not a toxin anti-toxin system.

[0141] According to specific embodiments, the anti-phage bacterial defense system is not DISARM.

[0142] According to specific embodiments, the anti-phage bacterial defense system is selected from the group consisting of Thoeris, Hachiman, Gabija and DSR2, as further described hereinbelow.

[0143] According to specific embodiments, the anti-defense system polypeptides is a TAD1 polypeptide. A TAD1 polypeptide disables the anti-phage bacterial defense system Thoeris described in Doron, S. et al. Science 359, eaar4120 (2018); and International Application Publication No. WO2018/220616. Hence, expression of a TAD1 polypeptide in a B. subtilis BEST7003 comprising the Thoeris system as provided in SEQ ID NO: 741 increases sensitivity of the B. subtilis BEST7003 to infection by at least one B. subtilis phage selected from the group consisting of SBSphiJ, SBSphiJ1, SBSphiJ2, SBSphiJ3, SBSphiJ4, SBSphiJ5 and SBSphiJ6, such as determined by a plaque assay or liquid culture infection e.g. as described in the Examples section which follows.

[0144] According to specific embodiments, the TAD1 polypeptide inhibits Thoeris defense by binding and chelating the TIR-derived signaling molecule, thus disallowing Thoeris effector activation and preventing the Thoeris-mediated premature cell death, such as determined by measuring the ability of filtered cell lysates derived from Thoeris-infected cells to activate the Thoeris effector ThsA (e.g. the NADase activity of the Thoeris effector ThsA).

[0145] The TAD1 polypeptide of some embodiments has at least 80% identity to an amino acid sequence selected from the group consisting of SEQ ID NOs: 22 and 323-577, each possibility represents a separate embodiment of the claimed invention.

[0146] According to specific embodiments, the TAD1 polypeptide has at least 80% identity to an amino acid sequence selected from the group consisting of SEQ ID NOs: 22, 324, 337, 338, 345, 400, 404, 438, 460, 464 and 543.

[0147] The TAD1 polypeptide of some embodiments has an e-value≤0.05 to an amino acid sequence selected from the group consisting of SEQ ID NO: 22 and 323-577, each possibility represents a separate embodiment of the claimed invention.

[0148] According to specific embodiments, the TAD1 polypeptide has an e-value≤0.05 to an amino acid sequence selected from the group consisting of SEQ ID NOs: 22, 324, 337, 338, 345, 400, 404, 438, 460, 464 and 543.

[0149] According to specific embodiments, the anti-defense system polypeptides is a HAD1 polypeptide. A HAD1 polypeptide disables the anti-phage bacterial defense system Hachiman described in Doron, S. et al. Science 359, eaar4120 (2018); and International Application Publication No. WO2018/220616. Hence, expression of a HAD1 polypeptide in a B. subtilis BEST7003 comprising the Hachiman system as provided in SEQ ID NO: 742 increases sensitivity of the B. subtilis BEST7003 to infection by at least one B. subtilis phage selected from the group consisting of SBSphiJ, SBSphiJ1, SBSphiJ2, SBSphiJ3, SBSphiJ5, SBSphiJ6 and SBSphiJ7, such as determined by a plaque assay e.g. as described in the Examples section which follows.

[0150] The HAD1 polypeptide of some embodiments has at least 80% identity to an amino acid sequence selected from the group consisting of SEQ ID NOs: 32 and 595-610, each possibility represents a separate embodiment of the claimed invention.

[0151] According to specific embodiments, the HAD1 polypeptide has at least 80% identity to an amino acid sequence selected from the group consisting of SEQ ID NOs: 32, 598, 604, 607 and 609.

[0152] The HAD1 polypeptide of some embodiments has an e-value≤0.05 to an amino acid sequence selected from the group consisting of SEQ ID NOs: 32 and 595-610, each possibility represents a separate embodiment of the claimed invention.

[0153] According to specific embodiments, the HAD1 polypeptide has an e-value≤0.05 to an amino acid sequence selected from the group consisting of SEQ ID NOs: 32, 598, 604, 607 and 609.

[0154] According to specific embodiments, the anti-defense system polypeptides is a GAD1 polypeptide. A GAD1 polypeptide disables the anti-phage bacterial defense system Gabija described in Doron, S. et al. Science 359, eaar4120 (2018); and International Application Publication No. WO2018/220616. Hence, expression of a GAD1 polypeptide in a B. subtilis BEST7003 comprising the Gabija system as provided in SEQ ID NO: 740 increases sensitivity of the B. subtilis BEST7003 to infection by at least one B. subtilis phage selected from the group consisting of SpBeta, SpBetaL6, SpBetaL7 and SpBetaL8, such as determined by a plaque assay e.g. as described in the Examples section which follows.

[0155] The GAD1 polypeptide of some embodiments has at least 80% identity to an amino acid sequence selected from the group consisting of SEQ ID NOs: 33 and 675-737, each possibility represents a separate embodiment of the claimed invention.

[0156] According to specific embodiments, the GAD1 polypeptide has at least 80% identity to an amino acid sequence selected from the group consisting of SEQ ID NOs: 33, 689, 723, 725 and 726.

[0157] The GAD1 polypeptide of some embodiments has e-value≤0.05 to an amino acid sequence selected from the group consisting of SEQ ID NOs: 33 and 675-737, each possibility represents a separate embodiment of the claimed invention.

[0158] According to specific embodiments, the GAD1 polypeptide embodiments has an e-value≤0.05 to an amino acid sequence selected from the group consisting of SEQ ID NOs: 33, 689, 723, 725 and 726.

[0159] According to specific embodiments, the anti-defense system polypeptides is a DSAD1 polypeptide. A DSAD1 polypeptide disables the anti-phage bacterial defense system DSR2, described in Gao et al. Science (2020) 369(6507):1077-1084, doi: 10.1126/science.aba0372. Hence, expression of a DSAD1 polypeptide in a B. subtilis BEST7003 comprising the DSR2 system as provided in SEQ ID NO: 746 increases sensitivity of the B. subtilis BEST7003 to infection by at a B. subtilis phage SPR, such as determined by a plaque assay or a liquid infection growth curves, e.g. as described in the Examples section which follows.

[0160] According to specific embodiments, the DSAD1 polypeptide inhibits DSR2 defense by binding a DSR2 polypeptide (e.g. SEQ ID NO: 753) and inhibiting its NADase activity in response to phage infection, such as determined by measuring the binding of the polypeptide to DSR2, e.g. as described in the Examples section which follows, and measuring the NAD+ concentrations in infected cells that contain DSR2 when DSAD1, e.g. as described in the Examples section which follows.

[0161] The DSAD1 polypeptide of some embodiments has an e-value≤0.05 to SEQ ID NO: 739.

[0162] The DSAD1 polypeptide of some embodiments has at least 80% identity to SEQ ID NO: 739.

[0163] The DSAD1 polypeptide of some embodiments has at least 35% identity and an e-value≤0.05 to SEQ ID NO: 739.

[0164] According to specific embodiments, the anti-defense system polypeptides is a TAD2 polypeptide. A TAD2 polypeptide disables one or more representations of the anti-phage bacterial defense system Thoeris described in Doron, S. et al. Science 359, eaar4120 (2018); and International Application Publication No. WO2018/220616. Hence, expression of a TAD2 polypeptide in a B. subtilis BEST7003 comprising the Thoeris system as provided in SEQ ID NO: 741 or 1300 increases sensitivity of the B. subtilis BEST7003 to infection by at least one B. subtilis phage selected from the group consisting of SPO1L1, SPO1L2, SPO1L4 and SPO1L5, such as determined by a plaque assay or liquid culture infection e.g. as described in the Examples section which follows.

[0165] According to specific embodiments, the TAD2 polypeptide inhibits Thoeris defense by binding and chelating the TIR-derived signaling molecule, thus disallowing Thoeris effector activation and preventing the Thoeris-mediated premature cell death, such as determined by measuring the ability of filtered cell lysates derived from Thoeris-infected cells to activate the Thoeris effector ThsA.

[0166] The TAD2 polypeptide of some embodiments has at least 80% identity to an amino acid sequence selected from the group consisting of SEQ ID Nos: 1046-1295, each possibility represents a separate embodiment of the claimed invention.

[0167] According to specific embodiments, the TAD2 polypeptide has at least 80% identity to an amino acid sequence selected from the group consisting of SEQ ID NOs: 1046-1051.

[0168] The TAD2 polypeptide of some embodiments has an e-value≤0.05 to an amino acid sequence selected from the group consisting of SEQ ID NO: 1046-1295, each possibility represents a separate embodiment of the claimed invention.

[0169] According to specific embodiments, the TAD2 polypeptide has an e-value≤0.05 to an amino acid sequence selected from the group consisting of SEQ ID NOs: 1046-1051.

[0170] As used herein, “percent identity”, “sequence identity” or “identity” or grammatical equivalents as used herein in the context of two nucleic acid or polypeptide sequences includes reference to the residues in the two sequences which are the same when aligned. When percentage of sequence identity is used in reference to proteins it is recognized that residue positions which are not identical often differ by conservative amino acid substitutions, where amino acid residues are substituted for other amino acid residues with similar chemical properties (e.g. charge or hydrophobicity) and therefore do not change the functional properties of the molecule. Where sequences differ in conservative substitutions, the percent sequence identity may be adjusted upwards to correct for the conservative nature of the substitution. Sequences which differ by such conservative substitutions are considered to have “sequence similarity” or “similarity”. Means for making this adjustment are well-known to those of skill in the art. Typically this involves scoring a conservative substitution as a partial rather than a full mismatch, thereby increasing the percentage sequence identity. Thus, for example, where an identical amino acid is given a score of 1 and a non-conservative substitution is given a score of zero, a conservative substitution is given a score between zero and 1. The scoring of conservative substitutions is calculated, e.g., according to the algorithm of Henikoff S and Henikoff J G. [Amino acid substitution matrices from protein blocks. Proc. Natl. Acad. Sci. U.S.A. 1992, 89(22): 10915-9].

[0171] Sequence identity (or homology) can be determined using any protein or nucleic acid sequence alignment algorithm such as Blast, ClustalW, MUSCLE, Mmseqs2, and HHpred.

[0172] In some embodiments, the sequence alignment program is a basic local alignment program, e.g., BLAST.

[0173] According to some embodiments of the invention, the identity is a global identity, i.e., an identity over the entire sequences of the invention and not over portions thereof.

[0174] According to specific embodiments, the polypeptide has at least 35% identity to the recited SEQ ID NO.

[0175] According to specific embodiments, the at least 35% identity comprises at least 40%, at least 45%, at least 50%, at least 60%, at least 65%, at least 70%, at least 75%, at least 80%, at least 85%, at least 90%, at least 91%, at least 92%, at least 93%, at least 94%, at least 95%, at least 96%, at least 97%, at least 98%, or at least 99% or 100% identity.

[0176] According to specific embodiments, the polypeptide has at least 80% identity to the recited SEQ ID NO.

[0177] According to specific embodiments, the at least 80% identity comprises at least 81%, at least 82%, at least 83%, at least 84%, at least 85%, at least 86%, at least 87%, at least 88%, at least 89%, at least 90%, at least 91%, at least 92%, at least 93%, at least 94%, at least 95%, at least 96%, at least 97%, at least 98%, or at least 99% or 100% identity.

[0178] According to specific embodiments, the at least 80% identity comprises at least 90% identity.

[0179] According to specific embodiments, the at least 80% identity comprises at least 95% identity.

[0180] As used herein, “e-value” refers to a parameter that describes the number of hits one can expect to see by chance in a sequence alignment (or homology) search to the recited sequence using a database of a particular size. It decreases exponentially as the Score (S) of the match increases. Essentially, the E value describes the random background noise. An E value of I assigned to a hit can be interpreted as meaning that in a database of the current size one might expect to see I match with a similar score simply by chance.

[0181] According to specific embodiments, the e-value represents a statistically significant homology or identity to the recited sequence.

[0182] Thus, according to specific embodiments, the e-value is ≤0.05.

[0183] According to specific embodiments, the e-value is ≤0.01, ≤0.001 or ≤0.0001.

[0184] Thus, the “TAD1 polypeptide”, “TAD2 polypeptide”, “HAD1 polypeptide”, “GAD1 polypeptide” and/or “DSAD1 polypeptide” may comprise a homolog, an ortholog, a deletion, insertion, or substitution variant, including an amino acid substitution of the recited amino acid sequence.

[0185] According to a specific embodiment, the “TAD1 polypeptide”, “TAD2 polypeptide” “HAD1 polypeptide”, “GAD1 polypeptide” and/or “DSAD1 polypeptide” comprises the recited amino acid sequence.

[0186] According to a specific embodiment, the “TAD1 polypeptide”, “TAD2 polypeptide”, “HAD1 polypeptide”, “GAD1 polypeptide” and/or “DSAD1 polypeptide” consists of the recited amino acid sequence.

[0187] According to specific embodiments, the terms “TAD1 polypeptide”, “TAD2 polypeptide”, “HAD1 polypeptide”, “GAD1 polypeptide” and/or “DSAD1 polypeptide” refer to a fragment of the amino acid sequence of “TAD1 polypeptide”, “TAD2 polypeptide”, “HAD1 polypeptide”, “GAD1 polypeptide” and/or “DSAD1 polypeptide” respectively, provided herein, which maintains the activity as described herein.

[0188] According to specific embodiments, the TAD1 polypeptide is 100-250 amino acids long, or 100-200 amino acids long.

[0189] According to specific embodiments, the HAD1 polypeptide is 40-150 amino acids long or 40-100 amino acids long.

[0190] According to specific embodiments, the GAD1 polypeptide is 100-400 amino acids long or 200-350 amino acids long.

[0191] According to specific embodiments, the TAD2 polypeptide is 30-300 amino acids long, 40-280 amino acids long, 80-280 amino acids long or 80-200 amino acids long.

[0192] According to specific embodiments, the TAD2 polypeptide is at least 80 amino acids long.

[0193] According to specific embodiments, the phage comprises a polynucleotide encoding one of the anti-defense polypeptides (i)-(v) described herein.

[0194] According to specific embodiments, the phage comprises a polynucleotide encoding one of the anti-defense polypeptides (i)-(iv) described herein.

[0195] According to specific embodiments, the phage comprises a polynucleotide encoding at least two, at least three, at least four or five of the anti-defense polypeptides (i)-(v) described herein.

[0196] Hence, according to specific embodiments, the phage comprises a polynucleotide encoding (i)+(ii), (i)+(iii), (i)+(iv), (i)+(v), (ii)+(iii), (ii)+(iv), (ii)+(v), (iii)+(iv), (iii)+(v), (i)+(ii)+(iii), (i)+(ii)+(iv), (i)+(ii)+(v), (i)+(iii)+(iv), (i)+(iii)+(v), (ii)+(iii)+(iv), (ii)+(iii)+(v), (ii)+(iv)+(v), (iii)+(iv)+(v), (i)+(ii)+(iii)+(iv), (i)+(ii)+(iii)+(v), (i)+(ii)+(iv)+(v), (i)+(iii)+(iv)+(v), (ii)+(iii)+(iv)+(v) or (i)+(ii)+(iii)+(iv)+(v), each possibility represents a separate embodiment of the present invention.

[0197] According to specific embodiments, the phage comprises a polynucleotide encoding at least two, at least three or four of the anti-defense polypeptides (i)-(iv) described herein.

[0198] Hence, according to specific embodiments, the phage comprises a polynucleotide encoding (i)+(ii), (i)+(iii), (i)+(iv), (ii)+(iii), (ii)+(iv), (iii)+(iv), (i)+(ii)+(iii), (i)+(ii)+(iv), (i)+(iii)+(iv) or (i)+(ii)+(iii)+(iv), each possibility represents a separate embodiment of the present invention.

[0199] Non-limiting examples of polynucleotides encoding TAD1 are provided in SEQ ID NOs: 5, 35-322.

[0200] Non-limiting examples of polynucleotides encoding HAD1 are provided in SEQ ID NOs: 15, 578-594.

[0201] Non-limiting examples of polynucleotides encoding GAD1 are provided in SEQ ID NOs: 16, 611-674.

[0202] Non-limiting examples of polynucleotides encoding DSAD1 are provided in SEQ ID NO: 738.

[0203] Non-limiting examples of polynucleotides encoding TAD2 are provided in SEQ ID NOs: 757-1045.

[0204] According to specific embodiments, the polynucleotide encoding the “TAD1 polypeptide”, “TAD2 polypeptide”, “HAD1 polypeptide”, “GAD1 polypeptide” or “DSAD1 polypeptide” is at least 70%, at least 75%, at least 80%, at least 81%, at least 82%, at least 83%, at least 84%, at least 85%, at least 86%, at least 87%, at least 88%, at least 89%, at least 90%, at least 91%, at least 92%, at least 93%, at least 94%, at least 95%, at least 96%, at least 97%, at least 98%, at least 99% or 100% identical or homologous to the SEQ ID NOs: 5, 35-322; 757-1045; 15, 578-594; 16, 611-674; or 738, respectively.

[0205] Various modalities may be used to introduce or express a heterologous polynucleotide encoding the anti-defense polypeptide in the phage, as further described hereinabove and below.

[0206] Thus, according to an aspect of the present invention there is provided a method of producing a phage, the method comprising contacting the phage with a polynucleotide encoding the anti-defense polypeptide, under conditions which allow integration of said polynucleotide in a genome of said phage, thereby producing the phage.

[0207] Various methods known within the art can be used to contacting the phage with the polynucleotide. Such methods are described for example in Gibb et al. (2021) Pharmaceuticals, 14, 634; Chen et al. (2019) Front. Microbiol. 10:954; and Rustad, et al. (2018) Synthetic Biology, 3(1) ysy002, doidotorg/10.1093/synbio/ysy002, the contents of which are fully incorporated herein by reference.

[0208] As used herein the term “polynucleotide” or “nucleic acid sequence”, which are interchangeably used herein, refers to a single or double stranded nucleic acid sequence provided e.g., in the form of an RNA sequence, a DNA and/or a composite polynucleotide sequences (e.g., a combination of the above).

[0209] According to specific embodiments, the polynucleotide of the present invention encodes no more than 20, no more than 15, no more than 10 genes expression products.

[0210] According to specific embodiments, the polynucleotide encodes one of the anti-defense polypeptides (i)-(v) described herein.

[0211] According to specific embodiments, the polynucleotide encodes one of the anti-defense polypeptides (i)-(iv) described herein.

[0212] According to specific embodiments, the polynucleotide comprises a nucleic acid sequence encoding one of the anti-defense polypeptides (i)-(v) described herein, whereby a plurality of polynucleotides can be used to assemble several anti-defense polypeptides, as described below.

[0213] According to specific embodiments, the polynucleotide comprises a nucleic acid sequence encoding one of the anti-defense polypeptides (i)-(iv) described herein, whereby a plurality of polynucleotides can be used to assemble several anti-defense polypeptides, as described below.

[0214] According to other specific embodiments, a single polynucleotide encodes at least two, at least three, at least four or five of the anti-defense polypeptides (i)-(v) described herein. Further description on expression of multiple polypeptides from a single polynucleotide is provided hereinbelow.

[0215] Hence, according to specific embodiments, the polynucleotide encodes (i)+(ii), (i)+(iii), (i)+(iv), (i)+(v), (ii)+(iii), (ii)+(iv), (ii)+(v), (iii)+(iv), (iii)+(v), (i)+(ii)+(iii), (i)+(ii)+(iv), (i)+(ii)+(v), (i)+(iii)+(iv), (i)+(iii)+(v), (ii)+(iii)+(iv), (ii)+(iii)+(v), (ii)+(iv)+(v), (iii)+(iv)+(v), (i)+(ii)+(iii)+(iv), (i)+(ii)+(iii)+(v), (i)+(ii)+(iv)+(v), (i)+(iii)+(iv)+(v), (ii)+(iii)+(iv)+(v) or (i)+(ii)+(iii)+(iv)+(v), each possibility represents a separate embodiment of the present invention.

[0216] According to other specific embodiments, a single polynucleotide encodes at least two, at least three or four of the anti-defense polypeptides (i)-(iv) described herein. Further description on expression of multiple polypeptides from a single polynucleotide is provided hereinbelow.

[0217] Hence, according to specific embodiments, the polynucleotide encodes (i)+(ii), (i)+(iii), (i)+(iv), (ii)+(iii), (ii)+(iv), (iii)+(iv), (i)+(ii)+(iii), (i)+(ii)+(iv), (i)+(iii)+(iv) or (i)+(ii)+(iii)+(iv), each possibility represents a separate embodiment of the present invention.

[0218] According to specific embodiments, in order to allow expression of the polypeptides described herein in an infected bacteria, the polynucleotides described herein are part of a nucleic acid construct (also referred to herein as an “expression vector” or a “vector”) which facilitates expression and/or integration of the polynucleotide in a phage genome.

[0219] Hence, according to an aspect of the present invention, there is provided a nucleic acid construct comprising a polynucleotide encoding an anti-defense polypeptide selected from the group consisting of:
[0220] (i) a TAD1 polypeptide having at least 80% identity and/or an e-value≤0.05 to an amino acid sequence selected from the group consisting of SEQ ID NO: 22 and 323-577, and wherein expression of said TAD1 polypeptide in a B. subtilis BEST7003 comprising SEQ ID NO: 741 increases sensitivity of said B. subtilis BEST7003 to infection by at least one B. subtilis phage selected from the group consisting of SBSphiJ, SBSphiJ1, SBSphiJ2, SBSphiJ3, SBSphiJ4, SBSphiJ5 and SBSphiJ6;
[0221] (ii) a HAD1 polypeptide having at least 80% identity and/or an e-value≤0.05 to an amino acid sequence selected from the group consisting of SEQ ID NO: 32 and 595-610, and wherein expression of said HAD1 polypeptide in a B. subtilis BEST7003 comprising SEQ ID NO: 742 increases sensitivity of said B. subtilis BEST7003 to infection by at least one B. subtilis phage selected from the group consisting of SBSphiJ, SBSphiJ1, SBSphiJ2, SBSphiJ3, SBSphiJ5, SBSphiJ6 and SBSphiJ7;
[0222] (iii) a GAD1 polypeptide having at least 80% identity and/or an e-value≤0.05 to an amino acid sequence selected from the group consisting of SEQ ID NO: 33 and 675-737, and wherein expression of said GAD1 polypeptide in a B. subtilis BEST7003 comprising SEQ ID NO: 740 increases sensitivity of said B. subtilis BEST7003 to infection by at least one B. subtilis phage selected from the group consisting of SpBeta, SpBetaL6, SpBetaL7, SpBetaL8;
[0223] (iv) a DSAD1 polypeptide having at least 80% identity and/or an e-value≤0.05 to SEQ ID NO: 739, and wherein expression of said DSAD1 polypeptide in a B. subtilis BEST7003 comprising SEQ ID NO: 746 increases sensitivity of said B. subtilis BEST7003 to infection by a B. subtilis phage SPR; and
[0224] (v) a TAD2 polypeptide having at least 80% identity and/or an e-value≤0.05 to an amino acid sequence selected from the group consisting of SEQ ID NO: 1046-1295, and wherein expression of said TAD2 polypeptide in a B. subtilis BEST7003 comprising SEQ ID NO: 741 or 1300 increases sensitivity of said B. subtilis BEST7003 to infection by at least one B. subtilis phage selected from the group consisting of SPO1L1, SPO1L2, SPO1L4 and SPO1L5; and a nucleic acid sequence heterologous to said polynucleotide which facilitates expression and/or integration of said polynucleotide in a phage genome.

[0225] According to an additional or an alternative aspect of the present invention, there is provided a nucleic acid construct comprising a polynucleotide encoding an anti-defense polypeptide selected from the group consisting of:
[0226] (i) a TAD1 polypeptide having at least 80% identity and/or an e-value≤0.05 to an amino acid sequence selected from the group consisting of SEQ ID NO: 22 and 323-577, and wherein expression of said TAD1 polypeptide in a B. subtilis BEST7003 comprising SEQ ID NO: 741 increases sensitivity of said B. subtilis BEST7003 to infection by at least one B. subtilis phage selected from the group consisting of SBSphiJ, SBSphiJ1, SBSphiJ2, SBSphiJ3, SBSphiJ4, SBSphiJ5 and SBSphiJ6;
[0227] (ii) a HAD1 polypeptide having at least 80% identity and/or an e-value≤0.05 to an amino acid sequence selected from the group consisting of SEQ ID NO: 32 and 595-610, and wherein expression of said HAD1 polypeptide in a B. subtilis BEST7003 comprising SEQ ID NO: 742 increases sensitivity of said B. subtilis BEST7003 to infection by at least one B. subtilis phage selected from the group consisting of SBSphiJ, SBSphiJ1, SBSphiJ2, SBSphiJ3, SBSphiJ5, SBSphiJ6 and SBSphiJ7;
[0228] (iii) a GAD1 polypeptide having at least 80% identity and/or an e-value≤0.05 to an amino acid sequence selected from the group consisting of SEQ ID NO: 33 and 675-737, and wherein expression of said GAD1 polypeptide in a B. subtilis BEST7003 comprising SEQ ID NO: 740 increases sensitivity of said B. subtilis BEST7003 to infection by at least one B. subtilis phage selected from the group consisting of SpBeta, SpBetaL6, SpBetaL7, SpBetaL8; and
[0229] (iv) a DSAD1 polypeptide having at least 80% identity and/or an e-value≤0.05 to SEQ ID NO: 739, and wherein expression of said DSAD1 polypeptide in a B. subtilis BEST7003 comprising SEQ ID NO: 746 increases sensitivity of said B. subtilis BEST7003 to infection by a B. subtilis phage SPR;
   and a nucleic acid sequence heterologous to said polynucleotide which facilitates expression and/or integration of said polynucleotide in a phage genome.

[0230] Such a nucleic acid construct includes at least one cis-acting regulatory element for directing expression of the nucleic acid sequence.

[0231] According to specific embodiments, the nucleic acid sequence heterologous to the polynucleotide encoding the anti-defense polypeptide is a cis-acting regulatory element for directing expression of the polynucleotide in an infected bacteria.

[0232] Cis-acting regulatory sequences include those that direct constitutive expression of a nucleotide sequence as well as those that direct inducible expression of the polynucleotide only under certain conditions. Thus, for example, a promoter sequence for directing transcription of the polynucleotide sequence in the bacteria in a constitutive or inducible manner is included in the nucleic acid construct.

[0233] Non-limiting examples of constitutive promoters suitable for use with some embodiments of the invention include T7, Sp6 and T3. Non-limiting Examples of inducible promoters suitable for use with some embodiments of the invention include the tetracycline-inducible promoter (Zabala M, et al., Cancer Res. 2004, 64(8): 2799-804), the arabinose metabolic operon promoter (araBAD) or pathogen-inducible promoters. Such promoters include those from pathogenesis-related proteins (PR proteins), which are induced following infection by a pathogen.

[0234] According to specific embodiments the promoter is a bacterial promoter.

[0235] A bacterial promoter is any DNA sequence capable of binding bacterial RNA polymerase and initiating the downstream (3′) transcription of a coding sequence into mRNA. A promoter can have a transcription initiation region, which is usually placed proximal to the 5′ end of the coding sequence. This transcription initiation region typically includes an RNA polymerase binding site and a transcription initiation site. A bacterial promoter can also have a second domain called an operator, which can overlap an adjacent RNA polymerase binding site at which RNA synthesis begins. The operator permits negative regulated (inducible) transcription, as a gene repressor protein can bind the operator and thereby inhibit transcription of a specific gene. Constitutive expression can occur in the absence of negative regulatory elements, such as the operator. In addition, positive regulation can be achieved by a gene activator protein binding sequence, which, if present is usually proximal (5′) to the RNA polymerase binding sequence.

[0236] An example of a gene activator protein is the catabolite activator protein (CAP), which helps initiate transcription of the lac operon in Escherichia coli (Raibaud et al. (1984) Annu. Rev. Genet. 18:173). Regulated expression can therefore be either positive or negative, thereby either enhancing or reducing transcription. Other examples of positive and negative regulatory elements are well known in the art. Various promoters that can be included in the protein expression system include, but are not limited to, a T7/LacO hybrid promoter, a trp promoter, a T7 promoter, a lac promoter, and a bacteriophage lambda promoter.

[0237] Sequences encoding metabolic pathway enzymes provide particularly useful promoter sequences. Examples include promoter sequences derived from sugar metabolizing enzymes, such as galactose, lactose (lac) (Chang et al. (1987) Nature 198:1056), and maltose. Additional examples include promoter sequences derived from biosynthetic enzymes such as tryptophan (trp) (Goeddel et al. (1980) Nucleic Acids Res. 8:4057; Yelverton et al. (1981) Nucleic Acids Res. 9:731; U.S. Pat. No. 4,738,921; EPO Publication Nos. 36,776 and 121,775). The beta-lactamase (bla) promoter system (Weissmann, (1981) “The Cloning of Interferon and Other Mistakes,” in Interferon 3 (ed. I. Gresser); bacteriophage lambda PL (Shimatake et al. (1981) Nature 292:128); the arabinose-inducible araB promoter (U.S. Pat. No. 5,028,530); and T5 (U.S. Pat. No. 4,689,406) promoter systems also provide useful promoter sequences. See also Balbas (2001) Mol. Biotech. 19:251-267, where E. coli expression systems are discussed.

[0238] In addition, synthetic promoters that do not occur in nature also function as bacterial promoters. For example, transcription activation sequences of one bacterial or phage promoter can be joined with the operon sequences of another bacterial or phage promoter, creating a synthetic hybrid promoter (U.S. Pat. No. 4,551,433). For example, the tac (Amann et al. (1983) Gene 25:167; de Boer et al. (1983) Proc. Natl. Acad. Sci. 80:21) and trc (Brosius et al. (1985) J. Biol. Chem. 260:3539-3541) promoters are hybrid trp-lac promoters comprised of both trp promoter and lac operon sequences that are regulated by the lac repressor. The tac promoter has the additional feature of being an inducible regulatory sequence. Thus, for example, expression of a coding sequence operably linked to the tac promoter can be induced in a cell culture by adding isopropyl-1-thio-.beta.-D-galactoside (IPTG). Furthermore, a bacterial promoter can include naturally occurring promoters of non-bacterial origin that have the ability to bind bacterial RNA polymerase and initiate transcription. A naturally occurring promoter of non-bacterial origin can also be coupled with a compatible RNA polymerase to produce high levels of expression of some genes in prokaryotes. The phage T7 RNA polymerase/promoter system is an example of a coupled promoter system (Studier et al. (1986) J. Mol. Biol. 189:113; Tabor et al. (1985) Proc. Natl. Acad. Sci. 82:1074). In addition, a hybrid promoter can also be comprised of a phage promoter and an E. coli operator region (EPO Publication No. 267,851).

[0239] In the construction of the construct, the promoter is preferably positioned approximately the same distance from the heterologous transcription start site as it is from the transcription start site in its natural setting. As is known in the art, however, some variation in this distance can be accommodated without loss of promoter function.

[0240] Alternatively or additionally, the nucleic acid construct is designed to allow integration of the polynucleotide in a location enabling expression of the polynucleotide from a native phage promoter.

[0241] Hence, according to specific embodiments, the nucleic acid construct is devoid of a promoter.

[0242] In order to avoid negatively affecting phage infectivity and specificity, the polynucleotide sequence is typically not inserted inside an existing phage open reading frame.

[0243] The nucleic acid construct can additionally contain a nucleic acid sequence encoding the repressor (or inducer) for the promoter. For example, an inducible construct of the present invention can regulate transcription from the Lac operator (LacO) by expressing the nucleotide sequence encoding the LacI repressor protein. Other examples include the use of the lexA gene to regulate expression of pRecA, and the use of trpO to regulate ptrp. Alleles of such genes that increase the extent of repression (e.g., laclq) or that modify the manner of induction (e.g., lambda CI857, rendering lambda pL thermo-inducible, or lambda CI+, rendering lambda pL chemo-inducible) can be employed.

[0244] Various construct schemes can be utilized to express few genes from a single nucleic acid construct. According to specific embodiments, the construct has an operon structure. Alternatively, each two nucleic acid sequence segments can be translationally fused via a protease recognition site cleavable by a protease expressed by the cell to be transformed with the nucleic acid construct. In this case, a chimeric polypeptide translated will be cleaved by the cell expressed protease. Still alternatively, the nucleic acid construct of some embodiments of the invention can include at least two Cis acting regulatory elements (e.g. promoter) each being for separately expressing a distinct polynucleotide. These at least two Cis acting regulatory elements can be identical or distinct.

[0245] Hence, according to specific embodiments, the nucleic acid sequence heterologous to the polynucleotide encoding the anti-defense system polypeptide is an element for expression of multiple polynucleotides from a single construct.

[0246] The nucleic acid construct of some embodiments of the invention includes additional sequences which render this construct suitable for replication and integration in prokaryotes, eukaryotes, or preferably both (e.g., shuttle vectors).

[0247] According to specific embodiments, the nucleic acid sequence heterologous to the polynucleotide encoding the anti-defense system polypeptide is a transmissible genetic element.

[0248] In other words, according to specific embodiments, the polynucleotide is on a transmissible genetic element, hence specific embodiments of the invention contemplates a transmissible element comprising a polynucleotide encoding the anti-defense system polypeptide.

[0249] As used herein the term “transmissible element” or “transmissible genetic element”, which are interchangeably used, refers to a nucleic acid sequence that allows the transfer of the polynucleotide from one cell to another, e.g. a plasmid.

[0250] According to specific embodiments, the construct comprises a recombination element for integrating the polynucleotide into a genome of a phage transfected with the construct.

[0251] According to specific embodiments, the nucleic acid sequence heterologous to the polynucleotide encoding the anti-defense system polypeptide is a recombination element.

[0252] According to a specific embodiment, the nucleic acid construct comprises a plurality of cloning sites for ligating a nucleic acid sequence of the invention such that it is under transcriptional regulation of the regulatory elements.

[0253] Selectable marker genes that ensure maintenance of the construct in the cell can also be included in the construct.

[0254] According to specific embodiments, the nucleic acid sequence heterologous to the polynucleotide encoding the anti-defense system polypeptide is a selectable marker.

[0255] Preferred selectable markers include those which confer resistance to drugs such as ampicillin, chloramphenicol, erythromycin, kanamycin (neomycin), and tetracycline (Davies et al. (1978) Annu. Rev. Microbiol. 32:469). Selectable markers can also allow a cell to grow on minimal medium, or in the presence of toxic metabolite and can include biosynthetic genes, such as those in the histidine, tryptophan, and leucine biosynthetic pathways.

[0256] Where appropriate, the nucleic acid sequences may be optimized for increased expression in the transformed organism. For example, the nucleic acid sequences can be synthesized using preferred codons for improved expression.

[0257] The present invention also contemplates uses of the phages disclosed herein. Hence, the phages disclosed herein comprising the polynucleotide encoding an anti-defense system polypeptide can be used for infecting a bacteria and/or treating a bacterial infection.

[0258] Thus, according to an aspect of the present invention there is provided a method comprising contacting the bacteria with the genetically modified phage disclosed herein, thereby infecting the bacteria.

[0259] According to specific embodiments, the contacting is effected in-vitro or ex-vivo.

[0260] According to other specific embodiments, the contacting is effected in-vivo.

[0261] According to an additional or an alternative aspect of the present invention there is provided a method of treating a bacterial infection in a subject in need thereof, the method comprising administering to the subject a therapeutically effective amount of a phage comprising a polynucleotide encoding an anti-defense system polypeptide, thereby treating the bacterial infection in the subject.

[0262] According to an additional or an alternative aspect of the present invention there is provided a phage comprising a polynucleotide encoding an anti-defense system polypeptide, for use in treating a bacterial infection in the subject in need thereof According to the treatment aspects, the phage may be a native phage comprising a polynucleotide encoding an anti-defense system polypeptide or a genetically modified phage, as further described herein.

[0263] As used herein, the term “treating” refers to curing, reversing, attenuating, alleviating, minimizing, suppressing or halting the deleterious effects of a bacterial infection. Those of skill in the art will understand that various methodologies and assays can be used to assess the development of bacterial infection, and similarly, various methodologies and assays may be used to assess the reversal, attenuation, alleviation or suppression of the pathology. Thus, for example, bacterial infection may be assessed by, but not limited to, clinical evaluation, urine dipstick tests, throat culture, sputum tests, histology, indirect non-culture-based tests, including C-reactive protein and procalcitonin tests, serological tests and/or nucleic acid amplification tests.

[0264] As used herein, the phrase “subject in need thereof” includes mammals, preferably human beings of any gender and at any age which suffer from bacterial infection.

[0265] According to specific embodiments, the bacteria is a Gram-negative bacteria or Negativicutes that stain negative in Gram stain.

[0266] Non-limiting examples of Gram-negative bacteria include Acinetobacter calcoaceticus, Actinobacillus actinomycetemcomitans, Aeromonas hydrophila, Alcaligenes xylosoxidans, Bacteroides, Bacteroides fragilis, Bartonella bacilliformis, Bordetella spp., Borrelia burgdorferi, Branhamella catarrhalis, Brucella spp., Campylobacter spp., Chalmydia pneumoniae, Chlamydia psittaci, Chlamydia trachomatis, Chromobacterium violaceum, Citrobacter spp., Eikenella corrodens, Enterobacter aerogenes, Escherichia coli, Flavobacterium meningosepticum, Fusobacterium spp., Haemophilus influenzae, Haemophilus spp., Helicobacter pylori, Klebsiella spp., Legionella spp., Leptospira spp., Moraxella catarrhalis, Morganella morganii, Mycoplasma pneumoniae, Neisseria gonorrhoeae, Neisseria meningitidis, Pasteurella multocida, Plesiomonas shigelloides, Prevotella spp., Proteus spp., Providencia rettgeri, Pseudomonas aeruginosa, Pseudomonas spp., Rickettsia prowazekii, Rickettsia rickettsii, Rochalimaea spp., Salmonella spp., Salmonella typhi, Serratia marcescens, Shigella spp., Treponema carateum, Treponema pallidum, Treponema pallidum endemicum, Treponema pertenue, Veillonella spp., Vibrio cholerae, Vibrio vulnificus, Yersinia enterocolitica, Yersinia pestis.

[0267] According to specific embodiments, the bacteria is gammaproteobacteria (e.g. Escherichia coli, pseudomonas, vibrio and klebsiella) or a Firmicutes (belonging to class Negativicutes that stain negative in Gram stain).

[0268] Non-limiting examples of Gram-positive bacteria include, but are not limited to, Actinomyces spp., Bacillus anthracis, Bifidobacterium spp., Clostridium botulinum, Clostridium perfringens, Clostridium spp., Clostridium tetani, Corynebacterium diphtheriae, Corynebacterium jeikeium, Enterococcus faecalis, Enterococcus faecium, Erysipelothrix rhusiopathiae, Eubacterium spp., Gardnerella vaginalis, Gemella morbillorum, Leuconostoc spp., Mycobacterium abcessus, Mycobacterium avium complex, Mycobacterium chelonae, Mycobacterium fortuitum, Mycobacterium haemophilium, Mycobacterium kansasii, Mycobacterium leprae, Mycobacterium marinum, Mycobacterium scrofulaceum, Mycobacterium smegmatis, Mycobacterium terrae, Mycobacterium tuberculosis, Mycobacterium ulcerans, Nocardia spp., Peptococcus niger, Peptostreptococcus spp., Proprionibacterium spp., Staphylococcus aureus, Staphylococcus auricularis, Staphylococcus capitis, Staphylococcus cohnii, Staphylococcus epidermidis, Staphylococcus haemolyticus, Staphylococcus hominis, Staphylococcus lugdanensis, Staphylococcus saccharolyticus, Staphylococcus saprophyticus, Staphylococcus schleiferi, Staphylococcus similans, Staphylococcus warneri, Staphylococcus xylosus, Streptococcus agalactiae (group B streptococcus), Streptococcus anginosus, Streptococcus bovis, Streptococcus canis, Streptococcus equi, Streptococcus milleri, Streptococcus mitior, Streptococcus mutans, Streptococcus pneumoniae, Streptococcus pyogenes (group A streptococcus), Streptococcus salivarius, Streptococcus sanguis.

[0269] According to specific embodiments the bacteria is a species selected from the group consisting of Escherichia, Shigella, Salmonella, Erwinia, Yersinia, Bacillus, Vibrio, Legionella, Pseudomonas, Neisseria, Bordetella, Helicobacter, Listeria, Agrobacterium, Staphylococcus, Streptococcus, Enterococcus, Clostridium, Corynebacterium, Mycobacterium, Treponema, Borrelia, Francisella, Brucella, Campylobacter, Klebsiella, Frankia, Bartonella, Rickettsia, Shewanella, Serratia, Enterobacter, Proteus, Providencia, Brochothrix, and Brevibacterium.

[0270] According to specific embodiments, the bacteria is selected from the group consisting of Escherichia coli, Klebsiella pneumoniae, Clostridium difficile, Pseudomonas aeruginosa.

[0271] According to specific embodiments, the bacteria expresses the bacterial defense system the anti-defense system polypeptide is directed against e.g. Thoeris, Hachiman, Gabija and/or DSR2.

[0272] According to specific embodiments, the method comprises determining expression of the bacterial defense system in the bacteria prior to the contacting or the treating.

[0273] Methods of determining expression are well known in the art and include e.g. sequencing, PCR, Western blot etc.

[0274] The phage therapy of some embodiments of the invention may be combined with one or more non-phage therapeutic and/or prophylactic agents, useful for the treatment and/or prevention of bacterial infections, as described herein and/or known in the art (e.g. one or more traditional antibiotic agents). Other therapeutic and/or prophylactic agents that may be used in combination with the phage(s) of some embodiments of the invention include, but are not limited to, antibiotic agents, anti-inflammatory agents, antiviral agents, antifungal agents, or local anesthetic agents.

[0275] Thus, according to specific embodiments, the methods of the present invention further comprise administering to the subject a therapeutically effective amount of an antibiotic or contacting the bacteria with an antibiotic.

[0276] According to specific embodiments, the uses of the present invention further comprise an antibiotic.

[0277] Exemplary antibiotics include, but are not limited to aminoglycoside antibiotics, cephalosporins, quinolone antibiotics, macrolide antibiotics, penicillins, sulfonamides, tetracyclines and carbapenems.

[0278] Standard or traditional antibiotic agents that can be administered with the phages described herein include, but are not limited to, amikacin, gentamicin, kanamycin, neomycin, netilmicin, paromomycin, rhodostreptomycin, streptomycin, tobramycin, apramycin, rifamycin, naphthomycin, mupirocin, geldanamycin, ansamitocin, carbacephems, imipenem, meropenem, ertapenem, faropenem, doripenem, panipenem/betamipron, biapenem, PZ-601, cephalosporins, cefacetrile, cefadroxil, cefalexin, cefaloglycin, cefalonium, cefaloridine, cefalotin, cefapirin, cefatrizine, cefazaflur, cefazedone, cefazolin, cefradine, cefroxadine, ceftezole, cefaclor, cefonicid, cefprozil, cefuroxime, cefuzonam, cefmetazole, cefotetan, cefoxitin, cefcapene, cefdaloxime, cefdinir, cefditoren, cefetamet, cefixime, cefmenoxime, cefteram, ceftibuten, ceftiofur, ceftiolene, ceftizoxime, ceftriaxone, cefoperazone, ceftazidime latamoxef, cefclidine, cefepime, cefluprenam, cefoselis, cefozopran, cefpirome, cefquinome, flomoxef. ceftobiprole, azithromycin, clarithromycin, dirithromycin, erythromycin, roxithromycin, aztreonam, pencillin and penicillin derivatives, actinomycin, bacitracin, colistin, polymyxin B, cinoxacin, flumequine, nalidixic acid, oxolinic acid, piromidic acid, pipemidic acid, rosoxacin, ciprofloxacin, enoxacin, fleroxacin, lomefloxacin, nadifloxacin, norfloxacin, ofloxacin, pefloxacin, rufloxacin, balofloxacin, gatifloxacin, grepafloxacin, levofloxacin, moxifloxacin, pazufloxacin, sparfloxacin, temafloxacin, tosufloxacin, clinafloxacin, garenoxacin, gemifloxacin, stifloxacin, trovalfloxacin, prulifloxacin, acetazolamide, benzolamide, bumetanide, celecoxib, chlorthalidone, clopamide, dichlorphenamide, dorzolamide, ethoxyzolamide, furosemide, hydrochlorothiazide, indapamide, mafendide, mefruside, metolazone, probenecid, sulfacetamide, sulfadimethoxine, sulfadoxine, sulfanilamides, sulfamethoxazole, sulfasalazine, sultiame, sumatriptan, xipamide, tetracycline, chlortetracycline, oxytetracycline, doxycycline, lymecycline, meclocycline, methacycline, minocycline, rolitetracycline, methicillin, nafcillin, oxacilin, cloxacillin, vancomycin, teicoplanin, clindamycin, co-trimoxazole, flucloxacillin, dicloxacillin, ampicillin, amoxicillin and any combination thereof.

[0279] According to another aspect there is provided an article of manufacture or a kit comprising as active ingredients a phage comprising a polynucleotide encoding an anti-defense system polypeptide; and an antibiotic.

[0280] According to specific embodiments, the article of manufacture is identified for treating a bacterial infection.

[0281] According to specific embodiments, the phage and the antibiotic are in separate formulations.

[0282] Thus, according to specific embodiments, the phage and the antibiotic are packaged in separate containers.

[0283] According to yet other specific embodiments the phage and the antibiotic are in a co-formulation.

[0284] According to other specific embodiments, the phage therapy is the only active agent administered to the subject, e.g. in the absence of a standard or traditional effective antibiotic agent.

[0285] The phages and antibiotic describe herein may be used per se or as part of a pharmaceutical composition, where it is mixed with suitable carriers or excipients.

[0286] As used herein a “pharmaceutical composition” refers to a preparation of one or more of the active ingredients described herein with other chemical components such as physiologically suitable carriers and excipients. The purpose of a pharmaceutical composition is to facilitate administration of a compound to an organism.

[0287] Herein the term “active ingredient” refers to the bacteriophage and/or antibiotic accountable for the biological effect.

[0288] Hereinafter, the phrases “physiologically acceptable carrier” and “pharmaceutically acceptable carrier” which may be interchangeably used refer to a carrier or a diluent that does not cause significant irritation to an organism and does not abrogate the biological activity and properties of the administered compound. An adjuvant is included under these phrases.

[0289] Herein the term “excipient” refers to an inert substance added to a pharmaceutical composition to further facilitate administration of an active ingredient. Examples, without limitation, of excipients include calcium carbonate, calcium phosphate, various sugars and types of starch, cellulose derivatives, gelatin, vegetable oils and polyethylene glycols.

[0290] Techniques for formulation and administration of drugs may be found in “Remington's Pharmaceutical Sciences,” Mack Publishing Co., Easton, PA, latest edition, which is incorporated herein by reference.

[0291] Suitable routes of administration may, for example, include topical, oral, rectal, transmucosal, especially transnasal, intestinal or parenteral delivery, including intramuscular, subcutaneous and intramedullary injections as well as intrathecal, direct intraventricular, intracardiac, e.g., into the right or left ventricular cavity, into the common coronary artery, intravenous, intraperitoneal, intranasal, or intraocular injections.

[0292] Alternately, one may administer the pharmaceutical composition in a local rather than systemic manner, for example, via injection of the pharmaceutical composition directly into a tissue region of a patient. In one embodiment, the phage may be administered directly into the an infected area or tissue of the subject.

[0293] Pharmaceutical compositions of some embodiments of the invention may be manufactured by processes well known in the art, e.g., by means of conventional mixing, dissolving, granulating, dragee-making, levigating, emulsifying, encapsulating, entrapping, spray drying, coating or lyophilizing processes.

[0294] Pharmaceutical compositions for use in accordance with some embodiments of the invention thus may be formulated in conventional manner using one or more physiologically acceptable carriers comprising excipients and auxiliaries, which facilitate processing of the active ingredients into preparations which, can be used pharmaceutically. Proper formulation is dependent upon the route of administration chosen.

[0295] For injection, the active ingredients of the pharmaceutical composition may be formulated in aqueous solutions, preferably in physiologically compatible buffers such as Hank's solution, Ringer's solution, or physiological salt buffer. For transmucosal administration, penetrants appropriate to the barrier to be permeated are used in the formulation. Such penetrants are generally known in the art.

[0296] For oral administration, the pharmaceutical composition can be formulated readily by combining the active compounds with pharmaceutically acceptable carriers well known in the art. Such carriers enable the pharmaceutical composition to be formulated as tablets, pills, dragees, capsules, liquids, gels, syrups, slurries, suspensions, and the like, for oral ingestion by a patient. Pharmacological preparations for oral use can be made using a solid excipient, optionally grinding the resulting mixture, and processing the mixture of granules, after adding suitable auxiliaries if desired, to obtain tablets or dragee cores. Suitable excipients are, in particular, fillers such as sugars, including lactose, sucrose, mannitol, or sorbitol; cellulose preparations such as, for example, maize starch, wheat starch, rice starch, potato starch, gelatin, gum tragacanth, methyl cellulose, hydroxypropylmethyl-cellulose, sodium carbomethylcellulose; and/or physiologically acceptable polymers such as polyvinylpyrrolidone (PVP). If desired, disintegrating agents may be added, such as cross-linked polyvinyl pyrrolidone, agar, or alginic acid or a salt thereof such as sodium alginate.

[0297] Dragee cores are provided with suitable coatings. For this purpose, concentrated sugar solutions may be used which may optionally contain gum arabic, talc, polyvinyl pyrrolidone, carbopol gel, polyethylene glycol, titanium dioxide, lacquer solutions and suitable organic solvents or solvent mixtures. Dyestuffs or pigments may be added to the tablets or dragee coatings for identification or to characterize different combinations of active compound doses.

[0298] Pharmaceutical compositions which can be used orally, include push-fit capsules made of gelatin as well as soft, sealed capsules made of gelatin and a plasticizer, such as glycerol or sorbitol. The push-fit capsules may contain the active ingredients in admixture with filler such as lactose, binders such as starches, lubricants such as talc or magnesium stearate and, optionally, stabilizers. In soft capsules, the active ingredients may be dissolved or suspended in suitable liquids, such as fatty oils, liquid paraffin, or liquid polyethylene glycols. In addition, stabilizers may be added. All formulations for oral administration should be in dosages suitable for the chosen route of administration.

[0299] For buccal administration, the compositions may take the form of tablets or lozenges formulated in conventional manner.

[0300] For administration by nasal inhalation, the active ingredients for use according to some embodiments of the invention are conveniently delivered in the form of an aerosol spray presentation from a pressurized pack or a nebulizer with the use of a suitable propellant, e.g., dichlorodifluoromethane, trichlorofluoromethane, dichloro-tetrafluoroethane or carbon dioxide. In the case of a pressurized aerosol, the dosage unit may be determined by providing a valve to deliver a metered amount. Capsules and cartridges of, e.g., gelatin for use in a dispenser may be formulated containing a powder mix of the compound and a suitable powder base such as lactose or starch.

[0301] The pharmaceutical composition described herein may be formulated for parenteral administration, e.g., by bolus injection or continuos infusion. Formulations for injection may be presented in unit dosage form, e.g., in ampoules or in multidose containers with optionally, an added preservative. The compositions may be suspensions, solutions or emulsions in oily or aqueous vehicles, and may contain formulatory agents such as suspending, stabilizing and/or dispersing agents.

[0302] Pharmaceutical compositions for parenteral administration include aqueous solutions of the active preparation in water-soluble form. Additionally, suspensions of the active ingredients may be prepared as appropriate oily or water based injection suspensions. Suitable lipophilic solvents or vehicles include fatty oils such as sesame oil, or synthetic fatty acids esters such as ethyl oleate, triglycerides or liposomes. Aqueous injection suspensions may contain substances, which increase the viscosity of the suspension, such as sodium carboxymethyl cellulose, sorbitol or dextran. Optionally, the suspension may also contain suitable stabilizers or agents which increase the solubility of the active ingredients to allow for the preparation of highly concentrated solutions.

[0303] Alternatively, the active ingredient may be in powder form for constitution with a suitable vehicle, e.g., sterile, pyrogen-free water based solution, before use.

[0304] The pharmaceutical composition of some embodiments of the invention may also be formulated in rectal compositions such as suppositories or retention enemas, using, e.g., conventional suppository bases such as cocoa butter or other glycerides.

[0305] Pharmaceutical compositions suitable for use in context of some embodiments of the invention include compositions wherein the active ingredients are contained in an amount effective to achieve the intended purpose. More specifically, a therapeutically effective amount means an amount of active ingredients (phage, antibiotic) effective to prevent, alleviate or ameliorate symptoms of a disorder (i.e. bacterial infection) or prolong the survival of the subject being treated.

[0306] Determination of a therapeutically effective amount is well within the capability of those skilled in the art, especially in light of the detailed disclosure provided herein.

[0307] For any preparation used in the methods of the invention, the therapeutically effective amount or dose can be estimated initially from in vitro and cell culture assays. For example, a dose can be formulated in animal models to achieve a desired concentration or titer. Such information can be used to more accurately determine useful doses in humans.

[0308] In some embodiments, the pharmaceutical composition is delivered to a subject in need thereof so as to provide one or more phages in an amount corresponding to a multiplicity of infection (MOI) of about 0.001 to about 10. MOI is determined by assessing the approximate bacterial load, or using an estimate for a given type of infection; and then providing phage in an amount calculated to give the desired MOL.

[0309] According to a specific embodiment the composition comprises at least about 10⁶ PFU, 10⁷ PFU, 108 PFU, 10⁹ PFU, or even 10¹⁰ PFU or more of the phage disclosed herein.

[0310] In other embodiments, the amount of phage is provided so as to reduce the amount of bacteria by at least 10%, 20%, 30%, 40%, 50%, 60%, 70%, 80%, 90% or even 100%.

[0311] Toxicity and therapeutic efficacy of the active ingredients described herein can be determined by standard pharmaceutical procedures in vitro, in cell cultures or experimental animals. The data obtained from these in vitro and cell culture assays and animal studies can be used in formulating a range of dosage for use in human. The dosage may vary depending upon the dosage form employed and the route of administration utilized. The exact formulation, route of administration and dosage can be chosen by the individual physician in view of the patient's condition. (See e.g., Fingl, et al., 1975, in “The Pharmacological Basis of Therapeutics”, Ch. 1 p. 1).

[0312] Dosage amount and interval may be adjusted individually to provide levels of the active ingredient are sufficient to induce or suppress the biological effect (minimal effective concentration, MEC). The MEC will vary for each preparation, but can be estimated from in vitro data. Dosages necessary to achieve the MEC will depend on individual characteristics and route of administration. Detection assays can be used to determine plasma concentrations.

[0313] Depending on the severity and responsiveness of the condition to be treated, dosing can be of a single or a plurality of administrations, with course of treatment lasting from several days to several weeks or until cure is effected or diminution of the disease state is achieved.

[0314] The amount of a composition to be administered will, of course, be dependent on the subject being treated, the severity of the affliction, the manner of administration, the judgment of the prescribing physician, etc.

[0315] It will be appreciated that since the phages of embodiments of this invention may enhance the anti-bacterial effect of an antibiotic, doses of the antibiotic may be lower (e.g. 20% lower, 30% lower, 40% lower, 50% lower, 60% lower, 70% lower, 80% lower or even 90% lower) than their gold standard dose or in a sub-efficacious dose when administered as a single agent.

[0316] Compositions described herein be comprise a single phage strain or a cocktail of multiple distinct phages wherein as least one of the phages is the phage disclosed herein.

[0317] According to specific embodiments, the compositions described herein comprise more than one phage strain. In one embodiment, the composition comprises 2 phage strains, 3 phage strains, 4 phage strains, 5 phage strains or more.

[0318] The phage cocktails of some embodiments comprise phages that target a single bacteria species or subspecies.

[0319] According to other specific embodiments, the phage cocktail comprises phages that target multiple bacteria species or subspecies, each phage with a distinct host range.

[0320] Compositions of some embodiments of the invention may, if desired, be presented in a pack or dispenser device, such as an FDA approved kit, which may contain one or more unit dosage forms containing the active ingredient. The pack may, for example, comprise metal or plastic foil, such as a blister pack. The pack or dispenser device may be accompanied by instructions for administration. The pack or dispenser may also be accommodated by a notice associated with the container in a form prescribed by a governmental agency regulating the manufacture, use or sale of pharmaceuticals, which notice is reflective of approval by the agency of the form of the compositions or human or veterinary administration. Such notice, for example, may be of labeling approved by the U.S. Food and Drug Administration for prescription drugs or of an approved product insert. Compositions comprising a preparation of the invention formulated in a compatible pharmaceutical carrier may also be prepared, placed in an appropriate container, and labeled for treatment of an indicated condition, as is further detailed above.

[0321] The phages, phage cocktails and articles of manufacture of some embodiments of the invention can be also used in anti-infective compositions for controlling the growth of bacteria on a surface contacted therewith. Thus, the phages of the invention may be incorporated into compositions that are formulated for application to biological surfaces, such as the skin and mucus membranes, as well as for application to non-biological surfaces.

[0322] Anti-infective formulations for use on biological surfaces include, but are not limited to, gels, creams, ointments, sprays, and the like. In particular embodiments, the anti-infective formulation is used to sterilize a surgical field, or the hands and/or exposed skin of healthcare workers and/or patients.

[0323] Anti-infective formulations for use on non-biological surfaces include sprays, solutions, suspensions, wipes impregnated with a solution or suspension and the like. In particular embodiments, the anti-infective formulation is used on solid surfaces in hospitals, nursing homes, ambulances, etc., including, e.g., appliances, countertops, and medical devices, hospital equipment. In preferred embodiments, the non-biological surface is a surface of a hospital apparatus or piece of hospital equipment. In particularly preferred embodiments, the non-biological surface is a surgical apparatus or piece of surgical equipment.

[0324] As used herein the term “about” refers to ±10%

[0325] The terms “comprises”, “comprising”, “includes”, “including”, “having” and their conjugates mean “including but not limited to”.

[0326] The term “consisting of” means “including and limited to”.

[0327] The term “consisting essentially of” means that the composition, method or structure may include additional ingredients, steps and/or parts, but only if the additional ingredients, steps and/or parts do not materially alter the basic and novel characteristics of the claimed composition, method or structure.

[0328] As used herein, the singular form “a”, “an” and “the” include plural references unless the context clearly dictates otherwise. For example, the term “a compound” or “at least one compound” may include a plurality of compounds, including mixtures thereof.

[0329] Throughout this application, various embodiments of this invention may be presented in a range format. It should be understood that the description in range format is merely for convenience and brevity and should not be construed as an inflexible limitation on the scope of the invention. Accordingly, the description of a range should be considered to have specifically disclosed all the possible subranges as well as individual numerical values within that range. For example, description of a range such as from 1 to 6 should be considered to have specifically disclosed subranges such as from 1 to 3, from 1 to 4, from 1 to 5, from 2 to 4, from 2 to 6, from 3 to 6 etc., as well as individual numbers within that range, for example, 1, 2, 3, 4, 5, and 6. This applies regardless of the breadth of the range.

[0330] Whenever a numerical range is indicated herein, it is meant to include any cited numeral (fractional or integral) within the indicated range. The phrases “ranging/ranges between” a first indicate number and a second indicate number and “ranging/ranges from” a first indicate number “to” a second indicate number are used herein interchangeably and are meant to include the first and second indicated numbers and all the fractional and integral numerals therebetween.

[0331] As used herein the term “method” refers to manners, means, techniques and procedures for accomplishing a given task including, but not limited to, those manners, means, techniques and procedures either known to, or readily developed from known manners, means, techniques and procedures by practitioners of the chemical, pharmacological, biological, biochemical and medical arts.

[0332] When reference is made to particular sequence listings, such reference is to be understood to also encompass sequences that substantially correspond to its complementary sequence as including minor sequence variations, resulting from, e.g., sequencing errors, cloning errors, or other alterations resulting in base substitution, base deletion or base addition, provided that the frequency of such variations is less than 1 in 50 nucleotides, alternatively, less than 1 in 100 nucleotides, alternatively, less than 1 in 200 nucleotides, alternatively, less than 1 in 500 nucleotides, alternatively, less than 1 in 1000 nucleotides, alternatively, less than 1 in 5,000 nucleotides, alternatively, less than 1 in 10,000 nucleotides.

TABLE 6
TAD1 IMG homologs

| | DNA | AA |
|---|---|---|
| | sequence | sequence |
| | SEQ ID | SEQ ID |
| Species | NO | NO |
| Clostridioides mangenotii | 185 | 376 |
| Acinetobacter pittii | 170 | 539 |
| Acinetobacter baumannii | 205 | 473 |
| Acinetobacter baumannii | 205 | 473 |
| Clostridium botulinum | 322 | 323 |
| Acinetobacter baumannii | 205 | 473 |
| Acinetobacter baumannii | 94 | 460 |
| Acinetobacter baumannii | 205 | 473 |
| Clostridioides difficile | 281 | 338 |
| Acinetobacter baumannii | 198 | 473 |
| Acinetobacter baumannii | 94 | 460 |
| Acinetobacter baumannii | 168 | 542 |
| Acinetobacter baumannii | 94 | 460 |
| Acinetobacter baumannii | 198 | 473 |
| Acinetobacter calcoaceticus | 170 | 539 |
| Bacillus virus Bcp1 | 271 | 334 |
| Acinetobacter baumannii | 168 | 542 |
| unclassified | 205 | 473 |
| Clostridium botulinum | 76 | 392 |
| Acinetobacter baumannii | 205 | 473 |
| Acinetobacter baumannii | 173 | 540 |
| Clostridium botulinum | 306 | 573 |
| Acinetobacter baumannii | 199 | 473 |
| Bacillus virus Riley | 139 | 552 |
| Tenacibaculum ovolyticum | 46 | 441 |
| Acinetobacter baumannii | 205 | 473 |
| Acinetobacter baumannii | 205 | 473 |
| Clostridium botulinum | 78 | 403 |
| Acinetobacter pittii | 125 | 459 |
| Acinetobacter baumannii | 205 | 473 |
| Acinetobacter baumannii | 200 | 476 |
| Acinetobacter baumannii | 205 | 473 |
| Opitutaceae bacterium TAV5 | 53 | 404 |
| Acinetobacter baumannii | 199 | 473 |
| Clostridium botulinum | 322 | 323 |
| Clostridium botulinum | 322 | 323 |
| Acinetobacter baumannii | 198 | 473 |
| Clostridium botulinum | 305 | 575 |
| Acinetobacter baumannii | 194 | 467 |
| Acinetobacter baumannii | 205 | 473 |
| Clostridium sporogenes | 70 | 389 |
| Acinetobacter baumannii | 198 | 473 |
| Acinetobacter baumannii | 94 | 460 |
| Acinetobacter baumannii | 94 | 460 |
| Acinetobacter pittii | 205 | 473 |
| Acinetobacter pittii | 194 | 467 |
| Acinetobacter baumannii | 94 | 460 |
| Acinetobacter baumannii | 198 | 473 |
| Acinetobacter baumannii | 205 | 473 |
| Acinetobacter baumannii | 198 | 473 |
| Clostridium botulinum | 304 | 574 |
| Acinetobacter baumannii | 94 | 460 |
| Acinetobacter baumannii | 194 | 467 |
| unclassified | 205 | 473 |
| Acinetobacter baumannii | 205 | 473 |
| Acinetobacter baumannii | 199 | 473 |
| Acinetobacter baumannii | 199 | 473 |
| Runella limosa | 209 | 482 |
| Ruminococcus sp. NK3A76 | 161 | 490 |
| Acinetobacter baumannii | 199 | 473 |
| Methylobacterium sp. | 237 | 484 |
| Acinetobacter baumannii | 205 | 473 |
| Agrobacterium sp. SUL3 | 214 | 527 |
| Acinetobacter baumannii | 205 | 473 |
| Acinetobacter baumannii | 205 | 473 |
| Bacillus virus JBP901 | 274 | 336 |
| Acinetobacter baumannii | 205 | 473 |
| Acinetobacter baumannii | 205 | 473 |
| Bacillus virus B4 | 133 | 556 |
| Burkholderia stagnalis | 234 | 530 |
| Acinetobacter baumannii | 197 | 473 |
| Acinetobacter baumannii | 199 | 473 |
| Clostridium botulinum | 85 | 400 |
| Clostridium haemolyticum | 190 | 481 |
| Acinetobacter baumannii | 94 | 460 |
| Acinetobacter baumannii | 198 | 473 |
| Acinetobacter pittii | 170 | 539 |
| Acinetobacter baumannii | 94 | 460 |
| Acinetobacter baumannii | 205 | 473 |
| Acinetobacter pittii | 205 | 473 |
| Bacillus virus Spock | 132 | 555 |
| Acinetobacter pittii | 194 | 467 |
| Acinetobacter baumannii | 205 | 473 |
| Acinetobacter baumannii | 94 | 460 |
| Acinetobacter baumannii | 205 | 473 |
| Acinetobacter baumannii | 205 | 473 |
| Acinetobacter baumannii | 205 | 473 |
| Acinetobacter baumannii | 195 | 468 |
| Acinetobacter baumannii | 205 | 473 |
| Clostridium sp. Marseille-P299 | 162 | 488 |
| Pseudomonas linyingensis | 174 | 543 |
| Acinetobacter baumannii | 205 | 473 |
| Acinetobacter baumannii | 94 | 460 |
| Clostridium botulinum | 85 | 400 |
| Acinetobacter baumannii | 198 | 473 |
| Acinetobacter baumannii | 205 | 473 |
| Acinetobacter baumannii | 94 | 460 |
| Acinetobacter baumannii | 205 | 473 |
| Acinetobacter baumannii | 205 | 473 |
| Acinetobacter baumannii | 199 | 473 |
| Bacillus cereus | 49 | 438 |
| Acinetobacter baumannii | 168 | 542 |
| Clostridioides difficile | 281 | 338 |
| Acinetobacter baumannii | 205 | 473 |
| Acinetobacter baumannii | 198 | 473 |
| Acinetobacter pittii | 170 | 539 |
| Acinetobacter baumannii | 198 | 473 |
| Clostridium roseum | 87 | 380 |
| Acinetobacter pittii | 170 | 539 |
| Acinetobacter pittii | 170 | 539 |
| Fibrobacteria bacterium GUT31 | 249 | 372 |
| Acinetobacter baumannii | 200 | 476 |
| Leptolyngbya sp. PCC 7375 | 189 | 465 |
| Clostridioides difficile | 280 | 339 |
| Acinetobacter baumannii | 199 | 473 |
| Acinetobacter baumannii | 205 | 473 |
| Acinetobacter baumannii | 94 | 460 |
| Clostridium botulinum | 305 | 575 |
| Bacillus weihaiensis | 124 | 463 |
| Clostridium botulinum | 305 | 575 |
| Acinetobacter baumannii | 205 | 473 |
| Acinetobacter pittii | 170 | 539 |
| Acinetobacter baumannii | 205 | 473 |
| Acinetobacter baumannii | 205 | 473 |
| Clostridium botulinum | 305 | 575 |
| Acinetobacter baumannii | 198 | 473 |
| Clostridium botulinum | 79 | 399 |
| Clostridium botulinum | 81 | 396 |
| Acinetobacter baumannii | 168 | 542 |
| Acinetobacter nosocomialis | 194 | 467 |
| Clostridium botulinum | 322 | 323 |
| Acinetobacter baumannii | 198 | 473 |
| Achromobacter sp. 2789STDY5608606 | 130 | 562 |
| Acinetobacter baumannii | 205 | 473 |
| Clostridium botulinum | 322 | 323 |
| Acinetobacter baumannii | 206 | 472 |
| Clostridium botulinum | 306 | 573 |
| Acinetobacter baumannii | 168 | 542 |
| Acinetobacter baumannii | 202 | 475 |
| Acinetobacter baumannii | 205 | 473 |
| Bacillus cereus | 49 | 438 |
| Acinetobacter baumannii | 204 | 470 |
| Acinetobacter baumannii | 205 | 473 |
| Acinetobacter baumannii | 198 | 473 |
| Bacillus virus Shbh1 | 95 | 406 |
| Clostridium botulinum | 306 | 573 |
| Acinetobacter baumannii | 205 | 473 |
| Clostridioides difficile | 281 | 338 |
| Acinetobacter baumannii | 205 | 473 |
| Acinetobacter baumannii | 205 | 473 |
| Acinetobacter baumannii | 205 | 473 |
| Acinetobacter baumannii | 94 | 460 |
| Clostridium botulinum | 322 | 323 |
| Acinetobacter baumannii | 94 | 460 |
| Clostridium botulinum | 81 | 396 |
| Acinetobacter baumannii | 205 | 473 |
| Acinetobacter baumannii | 205 | 473 |
| Clostridium botulinum | 322 | 323 |
| Acinetobacter baumannii | 205 | 473 |
| Acinetobacter baumannii | 94 | 460 |
| Burkholderia stagnalis | 235 | 529 |
| Acinetobacter baumannii | 198 | 473 |
| Clostridium botulinum | 306 | 573 |
| Acinetobacter baumannii | 205 | 473 |
| Acinetobacter baumannii | 205 | 473 |
| Acinetobacter baumannii | 94 | 460 |
| Acinetobacter baumannii | 205 | 473 |
| Acinetobacter baumannii | 205 | 473 |
| Acinetobacter baumannii | 205 | 473 |
| Acinetobacter baumannii | 198 | 473 |
| Acinetobacter baumannii | 94 | 460 |
| Acinetobacter baumannii | 168 | 542 |
| Bacillus virus AvesoBmore | 139 | 552 |
| Leptolyngbya sp. PCC 7375 | 188 | 464 |
| Acinetobacter baumannii | 94 | 460 |
| Acinetobacter baumannii | 205 | 473 |
| Acinetobacter nosocomialis | 205 | 473 |
| Clostridium beijerinckii | 86 | 398 |
| Clostridium botulinum | 322 | 323 |
| Acetobacterium wieringae | 288 | 373 |
| Acinetobacter baumannii | 205 | 473 |
| Clostridium botulinum | 306 | 573 |
| Acinetobacter baumannii | 94 | 460 |
| Acinetobacter baumannii | 205 | 473 |
| Acinetobacter baumannii | 205 | 473 |
| Acinetobacter baumannii | 205 | 473 |
| Acinetobacter baumannii | 205 | 473 |
| Clostridium botulinum | 305 | 575 |
| Acinetobacter baumannii | 205 | 473 |
| Acinetobacter baumannii | 205 | 473 |
| Acinetobacter baumannii | 205 | 473 |
| Acinetobacter baumannii | 199 | 473 |
| Acinetobacter baumannii | 198 | 473 |
| Acinetobacter baumannii | 197 | 473 |
| Acinetobacter pittii | 167 | 542 |
| Clostridium botulinum | 306 | 573 |
| Acinetobacter baumannii | 168 | 542 |
| Bacillus cereus | 49 | 438 |
| Acinetobacter baumannii | 205 | 473 |
| Bacillus virus BCP78 | 115 | 450 |
| Acinetobacter baumannii | 194 | 467 |
| Acinetobacter baumannii | 94 | 460 |
| Clostridium botulinum | 306 | 573 |
| Clostridium botulinum | 306 | 573 |
| Clostridium botulinum | 322 | 323 |
| Acinetobacter sp. NRRL B-65365 | 128 | 559 |
| Clostridium botulinum | 75 | 390 |
| Clostridium botulinum | 306 | 573 |
| Acinetobacter baumannii | 94 | 460 |
| Acinetobacter baumannii | 204 | 470 |
| Acinetobacter baumannii | 94 | 460 |
| Acinetobacter pittii | 171 | 538 |
| Acinetobacter baumannii | 205 | 473 |
| Acinetobacter pittii | 170 | 539 |
| Acinetobacter baumannii | 205 | 473 |
| Gammaproteobacteria bacterium | 213 | 531 |
| RIFCSPHIGHO2_12_FULL_63_22 | | |
| Acinetobacter baumannii | 205 | 473 |
| Clostridium botulinum | 306 | 573 |
| Sinorhizobium meliloti | 215 | 528 |
| Clostridium thermopalmarium | 54 | 430 |
| Acetobacterium dehalogenans | 287 | 374 |
| Acinetobacter baumannii | 205 | 473 |
| Acinetobacter baumannii | 205 | 473 |
| Acinetobacter baumannii | 198 | 473 |
| Clostridium botulinum | 305 | 575 |
| unclassified | 205 | 473 |
| Acinetobacter nosocomialis | 194 | 467 |
| Acinetobacter baumannii | 199 | 473 |
| Acinetobacter baumannii | 199 | 473 |
| Acinetobacter baumannii | 205 | 473 |
| Acinetobacter baumannii | 203 | 473 |
| Acinetobacter pittii | 168 | 542 |
| Clostridium botulinum | 83 | 402 |
| Clostridium botulinum | 305 | 575 |
| Acinetobacter baumannii | 205 | 473 |
| Acinetobacter baumannii | 199 | 473 |
| Clostridium botulinum | 305 | 575 |
| Acinetobacter baumannii | 193 | 478 |
| unclassified | 175 | 534 |
| Acinetobacter baumannii | 199 | 473 |
| Acinetobacter pittii | 310 | 535 |
| Clostridium botulinum | 306 | 573 |
| Acinetobacter baumannii | 205 | 473 |
| Acinetobacter baumannii | 198 | 473 |
| Acinetobacter baumannii | 205 | 473 |
| Acinetobacter baumannii | 205 | 473 |
| Mycobacterium mucogenicum | 314 | 576 |
| Acinetobacter baumannii | 170 | 539 |
| Acinetobacter baumannii | 198 | 473 |
| Acinetobacter baumannii | 205 | 473 |
| Acinetobacter baumannii | 205 | 473 |
| Acinetobacter baumannii | 94 | 460 |
| Acinetobacter baumannii | 205 | 473 |
| Acinetobacter baumannii | 198 | 473 |
| Acinetobacter baumannii | 199 | 473 |
| Clostridium botulinum | 321 | 324 |
| Acinetobacter baumannii | 201 | 471 |
| Clostridium botulinum | 305 | 575 |
| Acinetobacter baumannii | 198 | 473 |
| Acinetobacter baumannii | 205 | 473 |
| Acinetobacter baumannii | 94 | 460 |
| Acinetobacter baumannii | 94 | 460 |
| Acinetobacter baumannii | 205 | 473 |
| Clostridium acetobutylicum | 181 | 533 |
| Acinetobacter baumannii | 205 | 473 |
| Acinetobacter baumannii | 205 | 473 |
| Acinetobacter baumannii | 198 | 473 |
| Acinetobacter baumannii | 205 | 473 |
| Acinetobacter pittii | 169 | 541 |
| Acinetobacter baumannii | 197 | 473 |
| Clostridium botulinum | 322 | 323 |
| Acinetobacter baumannii | 205 | 473 |
| Clostridium botulinum | 306 | 573 |
| Acinetobacter baumannii | 205 | 473 |
| Acinetobacter baumannii | 205 | 473 |
| Acinetobacter baumannii | 205 | 473 |
| Clostridium botulinum | 305 | 575 |
| Acinetobacter baumannii | 198 | 473 |
| Acinetobacter baumannii | 205 | 473 |
| Acinetobacter baumannii | 205 | 473 |
| Clostridium perfringens | 279 | 355 |
| Acinetobacter baumannii | 205 | 473 |
| Acinetobacter baumannii | 205 | 473 |
| Acinetobacter baumannii | 198 | 473 |
| Acinetobacter nosocomialis | 194 | 467 |
| Acinetobacter baumannii | 94 | 460 |
| Clostridium botulinum | 322 | 323 |
| Acinetobacter baumannii | 205 | 473 |
| Clostridium botulinum | 322 | 323 |
| Acinetobacter baumannii | 205 | 473 |
| Clostridium botulinum | 322 | 323 |
| Paenibacillus sp. Mc5Re-14 | 282 | 345 |
| Acinetobacter baumannii | 198 | 473 |
| Acinetobacter sp. BMW17 | 140 | 560 |
| Acinetobacter baumannii | 205 | 473 |
| Acinetobacter baumannii | 200 | 476 |
| Clostridium botulinum | 322 | 323 |
| Acinetobacter baumannii | 199 | 473 |
| Paenibacillus sp. PDC88 | 277 | 329 |
| Acinetobacter baumannii | 205 | 473 |
| Acinetobacter pittii | 310 | 535 |
| Clostridium botulinum | 305 | 575 |
| Acinetobacter baumannii | 205 | 473 |
| Clostridium botulinum | 306 | 573 |
| Acinetobacter baumannii | 207 | 469 |
| Acinetobacter baumannii | 205 | 473 |
| Acinetobacter baumannii | 192 | 479 |
| Acinetobacter baumannii | 200 | 476 |
| Acinetobacter baumannii | 205 | 473 |
| Acinetobacter baumannii | 205 | 473 |
| Acinetobacter baumannii | 199 | 473 |
| Acinetobacter baumannii | 205 | 473 |
| Acinetobacter baumannii | 205 | 473 |
| Acinetobacter baumannii | 205 | 473 |
| Acinetobacter baumannii | 94 | 460 |
| Acinetobacter baumannii | 200 | 476 |
| Clostridium botulinum | 322 | 323 |
| Clostridium beijerinckii | 86 | 398 |
| Acinetobacter baumannii | 94 | 460 |
| Sphingomonas sp. Leaf29 | 217 | 526 |
| Acinetobacter baumannii | 94 | 460 |
| Acinetobacter baumannii | 205 | 473 |
| Clostridium botulinum | 80 | 395 |
| Acinetobacter nosocomialis | 205 | 473 |
| Burkholderia sp. GAS332 | 236 | 525 |
| Acinetobacter baumannii | 168 | 542 |
| Bacillus thuringiensis | 51 | 439 |
| Acinetobacter pittii | 205 | 473 |
| Acinetobacter baumannii | 94 | 460 |
| Bacillus cereus | 50 | 438 |
| Paenibacillus kribbensis | 276 | 346 |
| Sphingomonas sp. Leaf16 | 217 | 526 |
| Acinetobacter baumannii | 94 | 460 |
| Acinetobacter baumannii | 199 | 473 |
| Acinetobacter baumannii | 94 | 460 |
| Acinetobacter baumannii | 205 | 473 |
| Clostridium puniceum | 91 | 422 |
| Clostridium sporogenes | 268 | 358 |
| Acinetobacter baumannii | 94 | 460 |
| Acinetobacter baumannii | 205 | 473 |
| Bacillus phage Phrodo | 136 | 557 |
| Acinetobacter baumannii | 205 | 473 |
| Clostridium botulinum | 305 | 575 |
| Acinetobacter baumannii | 205 | 473 |
| Acinetobacter baumannii | 205 | 473 |
| Acinetobacter baumannii | 199 | 473 |
| Ruminococcus albus | 240 | 351 |
| Acinetobacter baumannii | 199 | 473 |
| Acinetobacter pittii | 172 | 537 |
| Acinetobacter baumannii | 205 | 473 |
| Acinetobacter baumannii | 199 | 473 |
| Acinetobacter baumannii | 94 | 460 |
| Acinetobacter baumannii | 205 | 473 |
| Acinetobacter baumannii | 168 | 542 |
| Acinetobacter baumannii | 168 | 542 |
| Clostridium botulinum | 84 | 401 |
| unclassified | 205 | 473 |
| Acinetobacter pittii | 170 | 539 |
| Acinetobacter sp. ZOR0008 | 205 | 473 |
| Acinetobacter baumannii | 198 | 473 |
| Clostridium botulinum | 305 | 575 |
| Acinetobacter baumannii | 199 | 473 |
| Acinetobacter baumannii | 205 | 473 |
| Acinetobacter nosocomialis | 196 | 477 |
| Clostridium botulinum | 85 | 400 |
| Acinetobacter baumannii | 198 | 473 |
| Acinetobacter baumannii | 198 | 473 |
| Bacillus cereus | 49 | 438 |
| Acinetobacter baumannii | 205 | 473 |
| Acinetobacter baumannii | 205 | 473 |
| Acinetobacter baumannii | 198 | 473 |
| Acinetobacter baumannii | 193 | 478 |
| Acinetobacter baumannii | 205 | 473 |
| Acinetobacter baumannii | 205 | 473 |
| Acinetobacter baumannii | 205 | 473 |
| Acinetobacter baumannii | 205 | 473 |
| Acinetobacter baumannii | 205 | 473 |
| Acinetobacter baumannii | 205 | 473 |
| Acinetobacter pittii | 170 | 539 |
| Achromobacter sp. NFACC18-2 | 131 | 561 |
| Acinetobacter baumannii | 205 | 473 |
| Acinetobacter baumannii | 205 | 473 |
| Acinetobacter baumannii | 205 | 473 |
| Acinetobacter baumannii | 94 | 460 |
| sp. NFACC18-2 | 205 | 473 |
| Acinetobacter pittii | 205 | 473 |
| Acinetobacter oleivorans | 208 | 466 |
| Acinetobacter baumannii | 94 | 460 |
| Acinetobacter baumannii | 94 | 460 |
| Acinetobacter baumannii | 94 | 460 |
| Acinetobacter baumannii | 200 | 476 |
| Acinetobacter baumannii | 94 | 460 |
| Acinetobacter baumannii | 205 | 473 |
| Bacillus phage LH-2015 | 272 | 332 |
| Bacillus cereus | 49 | 438 |
| Clostridium botulinum | 322 | 323 |
| Clostridium botulinum | 74 | 394 |
| Bacillus thuringiensis | 52 | 439 |
| Clostridium botulinum | 322 | 323 |
| Acinetobacter baumannii | 205 | 473 |
| unclassified | 191 | 480 |
| Acinetobacter baumannii | 94 | 460 |
| Acinetobacter baumannii | 94 | 460 |
| Acinetobacter baumannii | 94 | 460 |
| Acinetobacter baumannii | 205 | 473 |
| Acinetobacter baumannii | 205 | 473 |
| Bacillus virus Bigbertha | 138 | 553 |
| Clostridium botulinum | 322 | 323 |
| Acinetobacter baumannii | 206 | 472 |
| Gemmata massiliana | 218 | 485 |
| Clostridium botulinum | 321 | 324 |
| Bacillus virus BCP82 | 270 | 333 |
| Acinetobacter baumannii | 94 | 460 |
| Clostridium botulinum | 305 | 575 |
| Acinetobacter baumannii | 198 | 473 |
| Acinetobacter baumannii | 205 | 473 |
| Candidatus Lokiarchaeota archaeon CR_4 | 308 | 544 |
| Acinetobacter baumannii | 199 | 473 |
| Clostridium roseum | 87 | 380 |
| Clostridium botulinum | 305 | 575 |
| Acinetobacter baumannii | 198 | 473 |
| Clostridium botulinum | 71 | 391 |
| Acinetobacter pittii | 168 | 542 |
| Acinetobacter baumannii | 195 | 468 |
| Acinetobacter baumannii | 199 | 473 |
| Acinetobacter baumannii | 198 | 473 |
| Acinetobacter baumannii | 199 | 473 |
| Acinetobacter baumannii | 205 | 473 |
| Acinetobacter baumannii | 205 | 473 |
| Acinetobacter baumannii | 168 | 542 |
| Acinetobacter baumannii | 205 | 473 |
| Acinetobacter baumannii | 94 | 460 |
| Acinetobacter nosocomialis | 200 | 476 |
| Clostridium botulinum | 305 | 575 |
| Acinetobacter baumannii | 205 | 473 |
| Clostridium botulinum | 306 | 573 |
| Acinetobacter baumannii | 205 | 473 |
| Acinetobacter baumannii | 94 | 460 |
| Acinetobacter baumannii | 94 | 460 |
| Clostridium botulinum | 305 | 575 |
| Acinetobacter baumannii | 205 | 473 |
| Acinetobacter baumannii | 198 | 473 |
| Acinetobacter baumannii | 206 | 472 |
| Acinetobacter baumannii | 205 | 473 |
| Acinetobacter baumannii | 94 | 460 |
| Acinetobacter baumannii | 205 | 473 |
| Acinetobacter baumannii | 205 | 473 |
| Acinetobacter baumannii | 198 | 473 |
| Acinetobacter baumannii | 94 | 460 |
| Clostridium botulinum | 321 | 324 |
| Bacillus virus TsarBomba | 114 | 451 |
| Acinetobacter baumannii | 205 | 473 |
| Acinetobacter baumannii | 205 | 473 |
| Ideonella sakaiensis | 211 | 492 |
| Acinetobacter baumannii | 205 | 473 |
| Acinetobacter baumannii | 200 | 476 |
| Acinetobacter baumannii | 205 | 473 |
| Acinetobacter baumannii | 205 | 473 |
| Acinetobacter baumannii | 205 | 473 |
| Paenibacillus polymyxa | 275 | 347 |
| Acinetobacter baumannii | 94 | 460 |
| Acinetobacter baumannii | 198 | 473 |
| Acinetobacter baumannii | 205 | 473 |
| Acinetobacter baumannii | 198 | 473 |
| Acinetobacter baumannii | 94 | 460 |
| Clostridium botulinum | 306 | 573 |
| Acinetobacter baumannii | 199 | 473 |
| Acinetobacter baumannii | 94 | 460 |
| Clostridium botulinum | 77 | 393 |
| Acinetobacter baumannii | 205 | 473 |
| Acinetobacter pittii | 170 | 539 |
| Noviherbaspirillum sp. Root189 | 216 | 493 |
| Acinetobacter baumannii | 198 | 473 |
| Acinetobacter baumannii | 94 | 460 |
| Acinetobacter baumannii | 205 | 473 |
| Spirochaetes bacterium GWB1_59_5 | 278 | 330 |
| Acinetobacter baumannii | 198 | 473 |
| Clostridium botulinum | 85 | 400 |
| Clostridium botulinum | 306 | 573 |
| Acinetobacter baumannii | 205 | 473 |
| Acinetobacter baumannii | 94 | 460 |
| Clostridium beijerinckii | 86 | 398 |
| Psychrobacter cibarius | 165 | 483 |
| Acinetobacter baumannii | 205 | 473 |
| Acinetobacter baumannii | 205 | 473 |
| Acinetobacter baumannii | 205 | 473 |
| Acinetobacter baumannii | 205 | 473 |
| Clostridium botulinum | 305 | 575 |
| Acinetobacter baumannii | 94 | 460 |
| Acinetobacter sp. | 168 | 542 |
| Acinetobacter baumannii | 94 | 460 |
| Clostridium botulinum | 316 | 577 |
| Bacillus cereus | 49 | 438 |
| Acinetobacter baumannii | 205 | 473 |
| Acinetobacter baumannii | 94 | 460 |
| Bacillus cereus | 49 | 438 |
| Acinetobacter baumannii | 199 | 473 |
| Fibrobacter sp. UWCM | 89 | 379 |
| Achromobacter sp. 2789STDY5608615 | 129 | 563 |
| Clostridioides mangenotii | 269 | 337 |
| Acinetobacter baumannii | 198 | 473 |
| Bacillus virus Troll | 137 | 554 |
| Acinetobacter baumannii | 205 | 473 |
| Acinetobacter baumannii | 179 | 536 |
| Clostridium acetobutylicum | 181 | 533 |
| Acinetobacter baumannii | 205 | 473 |
| Acinetobacter baumannii | 168 | 542 |
| Acinetobacter baumannii | 168 | 542 |
| Acinetobacter baumannii | 94 | 460 |
| Acinetobacter baumannii | 94 | 460 |
| Acinetobacter baumannii | 205 | 473 |
| Acinetobacter baumannii | 198 | 473 |
| Candidatus Amesbacteria bacterium | 312 | 445 |
| GW2011_GWB1_47_19 | | |
| Acinetobacter pittii | 168 | 542 |
| Acinetobacter baumannii | 205 | 473 |
| Clostridium botulinum | 74 | 394 |
| Acinetobacter baumannii | 205 | 473 |
| Acinetobacter baumannii | 94 | 460 |
| Sphingomonas sp. Leaf32 | 217 | 526 |
| Acinetobacter pittii | 168 | 542 |
| Clostridium botulinum | 306 | 573 |
| Acinetobacter baumannii | 205 | 473 |
| Clostridium botulinum | 82 | 397 |
| Acinetobacter baumannii | 198 | 473 |
| Acinetobacter baumannii | 205 | 473 |
| Acinetobacter nosocomialis | 194 | 467 |
| Acinetobacter baumannii | 199 | 473 |
| Clostridium botulinum | 304 | 574 |
| Bacillus krulwichiae | 317 | 325 |
| Acinetobacter pittii | 170 | 539 |
| Acinetobacter baumannii | 198 | 473 |
| Clostridium botulinum | 306 | 573 |
| Acinetobacter baumannii | 94 | 460 |
| Acinetobacter baumannii | 205 | 473 |
| Sporomusa ovata | 126 | 449 |
| Bacillus virus Bc431 | 273 | 335 |
| unclassified | 286 | 326 |

TABLE 7
TAD1 MGV homologs

| | | | | | | | | | | DNA | AA |
|---|---|---|---|---|---|---|---|---|---|---|---|
| | | | | | | | | | | sequence | sequence |
| | | | | | | | | | | SEQ | SEQ |
| ictv_order | ictv_family | ictv_genus | host_domain | host_phylum | host_class | host_order | host_family | host_genus | host_species | ID NO | ID NO |
| Caudovirales | | | | | | | | | | 73 | 382 |
| Caudovirales | | | Bacteria | Firmicutes_A | Clostridia | Oscillospirales | Oscillospiraceae | CAG-110 | GUT_GENOME025308 | 88 | 388 |
| Caudovirales | Myoviridae | | Bacteria | Firmicutes_A | Clostridia | Lachnospirales | Lachnospiraceae | UBA11774 | GUT_GENOME009178 | 187 | 378 |
| Caudovirales | | | | | | | | | | 187 | 378 |
| Caudovirales | | | Bacteria | Firmicutes_A | Clostridia | Oscillospirales | Oscillospiraceae | CAG-110 | GUT_GENOME125250 | 108 | 386 |
| Caudovirales | | | Bacteria | Firmicutes_A | Clostridia | Oscillospirales | Oscillospiraceae | CAG-110 | GUT_GENOME125250 | 108 | 386 |
| Caudovirales | | | Bacteria | Firmicutes_A | Clostridia | Oscillospirales | Oscillospiraceae | CAG-110 | GUT_GENOME125250 | 108 | 386 |
| Caudovirales | | | Bacteria | Firmicutes_A | Clostridia | Oscillospirales | Oscillospiraceae | CAG-110 | GUT_GENOME125250 | 108 | 386 |
| Caudovirales | | | Bacteria | Firmicutes_A | Clostridia | Oscillospirales | Oscillospiraceae | CAG-110 | GUT_GENOME125250 | 110 | 384 |
| Caudovirales | | | Bacteria | Firmicutes_A | Clostridia | Oscillospirales | Oscillospiraceae | CAG-110 | GUT_GENOME125250 | 109 | 387 |
| Caudovirales | | | Bacteria | Firmicutes_A | Clostridia | Oscillospirales | Oscillospiraceae | CAG-110 | GUT_GENOME125250 | 107 | 385 |
| Caudovirales | | | Bacteria | Firmicutes_A | Clostridia | Oscillospirales | Oscillospiraceae | CAG-110 | GUT_GENOME125250 | 113 | 385 |
| Caudovirales | | | Bacteria | Firmicutes_A | Clostridia | Oscillospirales | Oscillospiraceae | CAG-110 | GUT_GENOME125250 | 107 | 385 |
| Caudovirales | | | Bacteria | Firmicutes_A | Clostridia | Oscillospirales | Oscillospiraceae | CAG-110 | GUT_GENOME125250 | 112 | 385 |
| Caudovirales | | | Bacteria | Firmicutes_A | Clostridia | Oscillospirales | Oscillospiraceae | CAG-110 | GUT_GENOME125250 | 111 | 383 |
| Caudovirales | | | Bacteria | Firmicutes_A | Clostridia | Oscillospirales | Oscillospiraceae | CAG-110 | GUT_GENOME125250 | 111 | 383 |
| Caudovirales | | | Bacteria | Firmicutes_A | Clostridia | Oscillospirales | Oscillospiraceae | CAG-110 | GUT_GENOME125250 | 111 | 383 |
| Caudovirales | | | | | | | | | | 72 | 381 |
| Caudovirales | | | Bacteria | Cyanobacteria | Vampirovibrionia | Gastranaerophilales | Gastranaerophilaceae | Zag111 | GUT_GENOME009256 | 145 | 524 |
| Caudovirales | | | | | | | | | | 146 | 523 |
| Caudovirales | | | Bacteria | Cyanobacteria | Vampirovibrionia | Gastranaerophilales | Gastranaerophilaceae | CAG-196 | GUT_GENOME018819 | 180 | 545 |
| Caudovirales | | | Bacteria | Cyanobacteria | Vampirovibrionia | Gastranaerophilales | Gastranaerophilaceae | CAG-196 | GUT_GENOME018819 | 180 | 545 |
| Caudovirales | | | | | | | | | | 311 | 446 |
| Caudovirales | | | | | | | | | | 182 | 375 |
| Caudovirales | | | Bacteria | Firmicutes_A | Clostridia | Oscillospirales | Oscillospiraceae | ER4 | GUT_GENOME258268 | 225 | 510 |
| Caudovirales | | | Bacteria | Firmicutes_A | Clostridia | Oscillospirales | Oscillospiraceae | ER4 | GUT_GENOME258268 | 225 | 510 |
| Caudovirales | Myoviridae | | Bacteria | Firmicutes_A | Clostridia | 4C28d-15 | CAG-727 | | GUT_GENOME166385 | 239 | 350 |
| Caudovirales | | | Bacteria | Firmicutes_A | Clostridia | | | | | 315 | 340 |
| Caudovirales | | | Bacteria | Firmicutes_A | Clostridia | Oscillospirales | | | | 176 | 548 |
| Caudovirales | | | Bacteria | Firmicutes_A | Clostridia | Oscillospirales | | | | 178 | 547 |
| Caudovirales | | | Bacteria | Firmicutes_A | Clostridia | Oscillospirales | | | | 177 | 547 |
| Caudovirales | Siphoviridae | | Bacteria | Firmicutes_A | Clostridia | 4C28d-15 | CAG-727 | QALS01 | GUT_GENOME009249 | 134 | 550 |
| Caudovirales | Siphoviridae | | Bacteria | Firmicutes_A | Clostridia | Oscillospirales | Oscillospiraceae | ER4 | | 232 | 512 |
| Caudovirales | Siphoviridae | | Bacteria | Firmicutes_A | Clostridia | Oscillospirales | Oscillospiraceae | ER4 | | 220 | 499 |
| Caudovirales | Siphoviridae | | Bacteria | Firmicutes_A | Clostridia | Oscillospirales | Oscillospiraceae | ER4 | | 232 | 512 |
| Caudovirales | Siphoviridae | | Bacteria | Firmicutes_A | Clostridia | Oscillospirales | Oscillospiraceae | ER4 | GUT_GENOME258268 | 230 | 512 |
| Caudovirales | Siphoviridae | | Bacteria | Firmicutes_A | Clostridia | Oscillospirales | Oscillospiraceae | ER4 | GUT_GENOME258268 | 230 | 512 |
| Caudovirales | Siphoviridae | | Bacteria | Firmicutes_A | Clostridia | Oscillospirales | Oscillospiraceae | ER4 | | 219 | 504 |
| Caudovirales | Siphoviridae | | | | | | | | | 93 | 453 |
| Caudovirales | | | Bacteria | Firmicutes_A | Clostridia | Oscillospirales | Oscillospiraceae | CAG-170 | GUT_GENOME007990 | 248 | 341 |
| Caudovirales | | | Bacteria | Firmicutes_A | Clostridia | Oscillospirales | Oscillospiraceae | CAG-170 | | 248 | 341 |
| Caudovirales | Siphoviridae | | Bacteria | Firmicutes_A | Clostridia | Oscillospirales | Oscillospiraceae | ER4 | | 231 | 511 |
| Caudovirales | | | Bacteria | Firmicutes_A | Clostridia | Oscillospirales | | | | 247 | 343 |
| Caudovirales | | | Bacteria | Firmicutes_A | Clostridia | Oscillospirales | | | | 247 | 343 |
| Caudovirales | | | Bacteria | Firmicutes_A | Clostridia | Oscillospirales | Oscillospiraceae | CAG-170 | GUT_GENOME007990 | 298 | 571 |
| Caudovirales | | | Bacteria | Firmicutes_A | Clostridia | Oscillospirales | Oscillospiraceae | CAG-170 | GUT_GENOME158868 | 247 | 343 |
| Caudovirales | Siphoviridae | | Bacteria | Firmicutes_A | Clostridia | Oscillospirales | Oscillospiraceae | ER4 | | 221 | 505 |
| Caudovirales | | | Bacteria | Firmicutes_A | Clostridia | Oscillospirales | Oscillospiraceae | ER4 | GUT_GENOME258268 | 223 | 509 |
| Caudovirales | Siphoviridae | | Bacteria | Firmicutes_A | Clostridia | Oscillospirales | Oscillospiraceae | ER4 | | 222 | 505 |
| Caudovirales | Siphoviridae | | Bacteria | Firmicutes_A | Clostridia | Oscillospirales | Oscillospiraceae | ER4 | GUT_GENOME258268 | 223 | 509 |
| Caudovirales | | | Bacteria | Firmicutes_A | Clostridia | Oscillospirales | Oscillospiraceae | ER4 | GUT_GENOME258268 | 221 | 505 |
| Caudovirales | Siphoviridae | | Bacteria | Firmicutes_A | Clostridia | Oscillospirales | Oscillospiraceae | ER4 | | 222 | 505 |
| Caudovirales | | | | | | | | | | 261 | 366 |
| Caudovirales | | | | | | | | | | 265 | 369 |
| Caudovirales | | | Bacteria | Firmicutes_A | Clostridia | Oscillospirales | Oscillospiraceae | | | 301 | 565 |
| Caudovirales | Siphoviridae | | Bacteria | Firmicutes_A | Clostridia | Lachnospirales | Lachnospiraceae | Eisenbergiella | GUT_GENOME239799 | 289 | 567 |
| Caudovirales | Siphoviridae | | Bacteria | Firmicutes_A | Clostridia | Oscillospirales | Ruminococcaceae | Faecalibacterium | | 37 | 420 |
| Caudovirales | | | Bacteria | Firmicutes_A | Clostridia | Oscillospirales | Oscillospiraceae | | | 301 | 565 |
| Caudovirales | Siphoviridae | | Bacteria | Firmicutes_A | Clostridia | Oscillospirales | Oscillospiraceae | CAG-170 | GUT_GENOME007990 | 284 | 328 |
| Caudovirales | | | Bacteria | Firmicutes_A | Clostridia | Oscillospirales | Oscillospiraceae | ER4 | | 227 | 513 |
| Caudovirales | Siphoviridae | | Bacteria | Firmicutes_A | Clostridia | Oscillospirales | Oscillospiraceae | ER4 | | 227 | 513 |
| Caudovirales | | | Bacteria | Firmicutes_A | Clostridia | 4C28d-15 | CAG-727 | UBA10281 | GUT_GENOME269798 | 241 | 349 |
| Caudovirales | | | | | | | | | | 259 | 362 |
| Caudovirales | | | | | | | | | | 266 | 357 |
| Caudovirales | | | | | | | | | | 252 | 360 |
| Caudovirales | Siphoviridae | | | | | | | | | 256 | 361 |
| Caudovirales | | | | | | | | | | 260 | 362 |
| Caudovirales | | | | | | | | | | 262 | 367 |
| Caudovirales | | | | | | | | | | 253 | 360 |
| Caudovirales | | | | | | | | | | 257 | 362 |
| Caudovirales | | | | | | | | | | 262 | 367 |
| Caudovirales | | | | | | | | | | 183 | 447 |
| Caudovirales | | | | | | | | | | 183 | 447 |
| Caudovirales | | | Bacteria | Firmicutes_A | Clostridia | Oscillospirales | Oscillospiraceae | CAG-170 | GUT_GENOME007990 | 290 | 569 |
| Caudovirales | | | Bacteria | Firmicutes_A | Clostridia | Oscillospirales | Oscillospiraceae | CAG-170 | | 299 | 570 |
| Caudovirales | | | Bacteria | Firmicutes_A | Clostridia | Oscillospirales | Oscillospiraceae | CAG-170 | GUT_GENOME007990 | 293 | 569 |
| Caudovirales | | | | | | | | | | 290 | 569 |
| Caudovirales | Siphoviridae | | Bacteria | Firmicutes_A | Clostridia | Oscillospirales | Oscillospiraceae | CAG-170 | GUT_GENOME007990 | 300 | 566 |
| Caudovirales | Siphoviridae | | Bacteria | Firmicutes_A | Clostridia | Oscillospirales | Oscillospiraceae | CAG-170 | | 294 | 569 |
| Caudovirales | Siphoviridae | | Bacteria | Firmicutes_A | Clostridia | Oscillospirales | Oscillospiraceae | | | 290 | 569 |
| Caudovirales | Siphoviridae | | Bacteria | Firmicutes_A | Clostridia | Oscillospirales | Oscillospiraceae | CAG-170 | | 296 | 569 |
| Caudovirales | Siphoviridae | | Bacteria | Firmicutes_A | Clostridia | Oscillospirales | Oscillospiraceae | | | 291 | 569 |
| Caudovirales | | | Bacteria | Firmicutes_A | Clostridia | Oscillospirales | Oscillospiraceae | CAG-170 | | 297 | 569 |
| Caudovirales | Siphoviridae | | Bacteria | Firmicutes_A | Clostridia | Oscillospirales | Oscillospiraceae | | | 290 | 569 |
| Caudovirales | | | Bacteria | Firmicutes_A | Clostridia | Oscillospirales | Oscillospiraceae | | | 292 | 569 |
| Caudovirales | | | Bacteria | Firmicutes_A | Clostridia | Oscillospirales | Oscillospiraceae | CAG-170 | | 292 | 569 |
| Caudovirales | Siphoviridae | | Bacteria | Firmicutes_A | Clostridia | Oscillospirales | Oscillospiraceae | | | 302 | 572 |
| Caudovirales | | | Bacteria | Firmicutes_A | Clostridia | Oscillospirales | Oscillospiraceae | CAG-170 | GUT_GENOME007990 | 300 | 566 |
| Caudovirales | Siphoviridae | | Bacteria | Firmicutes_A | Clostridia | Oscillospirales | Oscillospiraceae | | | 290 | 569 |
| Caudovirales | Siphoviridae | | Bacteria | Firmicutes_A | Clostridia | Oscillospirales | Oscillospiraceae | | | 291 | 569 |
| Caudovirales | Siphoviridae | | Bacteria | Firmicutes_A | Clostridia | Oscillospirales | Oscillospiraceae | | | 290 | 569 |
| Caudovirales | Siphoviridae | | Bacteria | Firmicutes_A | Clostridia | Oscillospirales | Oscillospiraceae | CAG-170 | | 299 | 570 |
| Caudovirales | | | Bacteria | Firmicutes_A | Clostridia | Oscillospirales | Oscillospiraceae | CAG-170 | | 296 | 569 |
| Caudovirales | | | Bacteria | Firmicutes_A | Clostridia | Oscillospirales | Oscillospiraceae | CAG-170 | | 294 | 569 |
| Caudovirales | Siphoviridae | | Bacteria | Firmicutes_A | Clostridia | Oscillospirales | Oscillospiraceae | | | 302 | 572 |
| Caudovirales | | | Bacteria | Firmicutes_A | Clostridia | Oscillospirales | Oscillospiraceae | CAG-170 | | 299 | 570 |
| Caudovirales | Siphoviridae | | Bacteria | Firmicutes_A | Clostridia | Oscillospirales | Oscillospiraceae | ER4 | GUT_GENOME258268 | 229 | 508 |
| Caudovirales | Siphoviridae | | Bacteria | Firmicutes_A | Clostridia | Oscillospirales | Oscillospiraceae | ER4 | GUT_GENOME258268 | 229 | 508 |
| Caudovirales | | | Bacteria | Firmicutes_A | Clostridia | 4C28d-15 | | | | 242 | 348 |
| Caudovirales | | | | | | | | | | 242 | 348 |
| Caudovirales | | | Bacteria | Firmicutes_A | Clostridia | Oscillospirales | Oscillospiraceae | CAG-170 | GUT_GENOME007990 | 245 | 342 |
| Caudovirales | | | Bacteria | Firmicutes_A | Clostridia | Oscillospirales | Oscillospiraceae | CAG-170 | | 243 | 342 |
| Caudovirales | | | Bacteria | Firmicutes_A | Clostridia | Oscillospirales | Oscillospiraceae | CAG-170 | | 246 | 342 |
| Caudovirales | | | Bacteria | Firmicutes_A | Clostridia | Oscillospirales | Oscillospiraceae | CAG-170 | | 245 | 342 |
| Caudovirales | Siphoviridae | | Bacteria | Firmicutes_A | Clostridia | Oscillospirales | Oscillospiraceae | CAG-170 | GUT_GENOME007990 | 246 | 342 |
| Caudovirales | | | Bacteria | Firmicutes_A | Clostridia | | | | | 245 | 342 |
| Caudovirales | | | Bacteria | Firmicutes_A | Clostridia | Oscillospirales | Oscillospiraceae | CAG-170 | GUT_GENOME007990 | 285 | 327 |
| Caudovirales | | | Bacteria | Firmicutes_A | Clostridia | Oscillospirales | Oscillospiraceae | CAG-170 | | 244 | 342 |
| Caudovirales | | | Bacteria | Firmicutes_A | Clostridia | Oscillospirales | Oscillospiraceae | ER4 | | 224 | 507 |
| Caudovirales | Siphoviridae | | Bacteria | Firmicutes_A | Clostridia | Oscillospirales | Oscillospiraceae | ER4 | GUT_GENOME258268 | 233 | 500 |
| Caudovirales | | | Bacteria | Firmicutes_A | Clostridia | Oscillospirales | Oscillospiraceae | ER4 | | 224 | 507 |
| Caudovirales | | | | | | | | | | 36 | 421 |
| Caudovirales | | | Bacteria | Firmicutes_A | Clostridia | Oscillospirales | Oscillospiraceae | ER4 | | 228 | 506 |
| Caudovirales | Siphoviridae | | Bacteria | Firmicutes_A | Clostridia | Oscillospirales | Oscillospiraceae | ER4 | | 226 | 503 |
| Caudovirales | | | | | | | | | | 258 | 364 |
| Caudovirales | | | | | | | | | | 267 | 356 |
| Caudovirales | | | | | | | | | | 255 | 371 |
| Caudovirales | | | | | | | | | | 92 | 454 |
| Caudovirales | | | | | | | | | | 263 | 365 |
| Caudovirales | Myoviridae | | | | | | | | | 135 | 551 |
| Caudovirales | | | Bacteria | Firmicutes_A | Clostridia | Oscillospirales | Oscillospiraceae | CAG-170 | GUT_GENOME007990 | 295 | 568 |
| Caudovirales | | | Bacteria | Firmicutes_A | Clostridia | Oscillospirales | Oscillospiraceae | CAG-170 | GUT_GENOME007990 | 295 | 568 |
| Caudovirales | | | Bacteria | Firmicutes_A | Clostridia | Oscillospirales | Oscillospiraceae | Oscillibacter | GUT_GENOME124777 | 144 | 496 |
| Caudovirales | Siphoviridae | | | | | | | | | 48 | 443 |
| Caudovirales | Siphoviridae | | | | | | | | | 264 | 359 |
| Caudovirales | | | | | | | | | | 250 | 363 |
| Caudovirales | | | | | | | | | | 251 | 368 |
| Caudovirales | | | | | | | | | | 47 | 442 |
| Caudovirales | | | | | | | | | | 47 | 442 |
| Caudovirales | Siphoviridae | | | | | | | | | 264 | 359 |
| Caudovirales | Siphoviridae | | Bacteria | Patescibacteria | Saccharimonadia | Saccharimonadales | Saccharimonadaceae | TM7x | GUT_GENOME063140 | 47 | 442 |
| Caudovirales | | | | | | | | | | 307 | 546 |
| Caudovirales | | | | | | | | | | 45 | 440 |
| Caudovirales | | Triavirus | Bacteria | Firmicutes_A | Clostridia | Lachnospirales | Lachnospiraceae | | | 42 | 409 |
| Caudovirales | | | Bacteria | Firmicutes_A | Clostridia | Lachnospirales | Lachnospiraceae | | | 42 | 409 |
| Caudovirales | | | Bacteria | Firmicutes_A | Clostridia | Lachnospirales | Lachnospiraceae | | | 65 | 435 |
| Caudovirales | Siphoviridae | | Bacteria | Firmicutes_A | Clostridia | Lachnospirales | Lachnospiraceae | Dorea | GUT_GENOME000149 | 41 | 414 |
| Caudovirales | | | Bacteria | Firmicutes_A | Clostridia | Lachnospirales | Lachnospiraceae | | | 39 | 411 |
| Caudovirales | | | Bacteria | Firmicutes_A | Clostridia | Lachnospirales | Lachnospiraceae | | | 65 | 435 |
| Caudovirales | | | Bacteria | Firmicutes_A | Clostridia | Lachnospirales | Lachnospiraceae | Dorea | GUT_GENOME000149 | 40 | 417 |
| Caudovirales | | | Bacteria | Firmicutes_A | Clostridia | Lachnospirales | Lachnospiraceae | Dorea | GUT_GENOME000149 | 39 | 411 |
| Caudovirales | | | Bacteria | Firmicutes_A | Clostridia | Lachnospirales | Lachnospiraceae | Dorea | GUT_GENOME000149 | 39 | 411 |
| Caudovirales | | | Bacteria | Firmicutes_A | Clostridia | Lachnospirales | Lachnospiraceae | Dorea | GUT_GENOME000149 | 40 | 417 |
| Caudovirales | | | Bacteria | Firmicutes_A | Clostridia | Lachnospirales | Lachnospiraceae | Dorea | GUT_GENOME000149 | 40 | 417 |
| Caudovirales | | | Bacteria | Firmicutes_A | Clostridia | Lachnospirales | Lachnospiraceae | | | 43 | 408 |
| Caudovirales | Siphoviridae | | Bacteria | Firmicutes_A | Clostridia | Lachnospirales | Lachnospiraceae | Clostridium_M | | 164 | 489 |
| Caudovirales | Siphoviridae | | Bacteria | Firmicutes_A | Clostridia | Lachnospirales | Lachnospiraceae | Clostridium_M | | 166 | 491 |
| Caudovirales | | | Bacteria | Firmicutes_A | Clostridia | Lachnospirales | Lachnospiraceae | Dorea | GUT_GENOME000149 | 64 | 434 |
| Caudovirales | | | Bacteria | Firmicutes_A | Clostridia | Lachnospirales | Lachnospiraceae | | | 97 | 415 |
| Caudovirales | | | | | | | | | | 35 | 405 |
| Caudovirales | | | | | | | | | | 238 | 344 |
| Caudovirales | Siphoviridae | | Bacteria | Firmicutes_A | Clostridia | Lachnospirales | Lachnospiraceae | Faecalicatena | | 68 | 433 |
| Caudovirales | | | Bacteria | Firmicutes_A | Clostridia | Lachnospirales | Lachnospiraceae | | | 66 | 436 |
| Caudovirales | Siphoviridae | | Bacteria | Firmicutes_A | Clostridia | Lachnospirales | Lachnospiraceae | | | 69 | 433 |
| Caudovirales | Siphoviridae | | Bacteria | Firmicutes_A | Clostridia | Lachnospirales | Lachnospiraceae | | | 67 | 437 |
| Caudovirales | | | Bacteria | Firmicutes_A | Clostridia | Lachnospirales | Lachnospiraceae | | | 99 | 412 |
| Caudovirales | | | Bacteria | Firmicutes_A | Clostridia | Lachnospirales | Lachnospiraceae | | | 101 | 412 |
| Caudovirales | | | Bacteria | Firmicutes_A | Clostridia | Lachnospirales | Lachnospiraceae | | | 101 | 412 |
| Caudovirales | Siphoviridae | | Bacteria | Firmicutes_A | Clostridia | Lachnospirales | Lachnospiraceae | | | 63 | 431 |
| Caudovirales | Siphoviridae | | Bacteria | Firmicutes_A | Clostridia | Lachnospirales | Lachnospiraceae | | | 67 | 437 |
| Caudovirales | | | Bacteria | Firmicutes_A | Clostridia | Lachnospirales | Lachnospiraceae | Faecalicatena | | 68 | 433 |
| Caudovirales | | | Bacteria | Firmicutes_A | Clostridia | Lachnospirales | Lachnospiraceae | | | 100 | 412 |
| Caudovirales | | | Bacteria | Firmicutes_A | Clostridia | Lachnospirales | Lachnospiraceae | | | 100 | 412 |
| Caudovirales | | | Bacteria | Firmicutes_A | Clostridia | Lachnospirales | Lachnospiraceae | | | 66 | 436 |
| Caudovirales | Siphoviridae | | Bacteria | Firmicutes_A | Clostridia | Lachnospirales | Lachnospiraceae | | | 69 | 433 |
| Caudovirales | | | Bacteria | Firmicutes_A | Clostridia | Lachnospirales | Lachnospiraceae | | | 63 | 431 |
| Caudovirales | Siphoviridae | | Bacteria | Firmicutes_A | Clostridia | Lachnospirales | Lachnospiraceae | | | 67 | 437 |
| Caudovirales | | | Bacteria | Firmicutes_A | Clostridia | Lachnospirales | Lachnospiraceae | | | 102 | 410 |
| Caudovirales | Siphoviridae | | Bacteria | Firmicutes_A | Clostridia | Lachnospirales | Lachnospiraceae | | | 63 | 431 |
| Caudovirales | | | Bacteria | Firmicutes_A | Clostridia | Lachnospirales | Lachnospiraceae | | | 96 | 416 |
| Caudovirales | Siphoviridae | | Bacteria | Firmicutes_A | Clostridia | Clostridiales | Clostridiaceae | Clostridium | GUT_GENOME096036 | 303 | 564 |
| Caudovirales | Podoviridae | | Bacteria | Cyanobacteria | Vampirovibrionia | Gastranaerophilales | Gastranaerophilaceae | Zag111 | GUT_GENOME009256 | 127 | 549 |
| Caudovirales | | | | | | | | | | 254 | 370 |
| Caudovirales | Myoviridae | | Bacteria | | | | | | | 158 | 498 |
| Caudovirales | | | | | | | | | | 313 | 419 |
| Caudovirales | Siphoviridae | | Bacteria | Firmicutes_A | Clostridia | Oscillospirales | Ruminococcaceae | Ruminococcus_C | | 320 | 353 |
| Caudovirales | | | Bacteria | Firmicutes_A | Clostridia | Lachnospirales | Lachnospiraceae | | | 106 | 432 |
| Caudovirales | Podoviridae | | | | | | | | | 309 | 532 |
| Caudovirales | | | | | | | | | | 120 | 455 |
| Caudovirales | Siphoviridae | | Bacteria | Firmicutes_A | Clostridia | Oscillospirales | Ruminococcaceae | Ruminococcus_C | | 318 | 354 |
| Caudovirales | Siphoviridae | | Bacteria | Firmicutes_A | Clostridia | Oscillospirales | Ruminococcaceae | Ruminococcus_C | | 318 | 354 |
| Caudovirales | Siphoviridae | | Bacteria | Firmicutes_A | Clostridia | Oscillospirales | Ruminococcaceae | Ruminococcus_C | GUT_GENOME066545 | 318 | 354 |
| Caudovirales | Siphoviridae | | Bacteria | Firmicutes_A | Clostridia | Oscillospirales | Ruminococcaceae | Ruminococcus_C | | 318 | 354 |
| Caudovirales | Siphoviridae | | Bacteria | Firmicutes_A | Clostridia | Lachnospirales | Lachnospiraceae | Blautia | | 159 | 515 |
| Caudovirales | Siphoviridae | | Bacteria | Firmicutes_A | Clostridia | Lachnospirales | Lachnospiraceae | Blautia | | 159 | 515 |
| Caudovirales | | | Bacteria | Proteobacteria | Gammaproteobacteria | Pseudomonadales | Moraxellaceae | Acinetobacter | GUT_GENOME141315 | 205 | 474 |
| Caudovirales | | | | | | | | | | 121 | 457 |
| Caudovirales | | | | | | | | | | 117 | 456 |
| Caudovirales | | | | | | | | | | 117 | 456 |
| Caudovirales | | | | | | | | | | 117 | 456 |
| Caudovirales | | | | | | | | | | 119 | 452 |
| Caudovirales | | | | | | | | | | 118 | 458 |
| Caudovirales | | | | | | | | | | 116 | 458 |
| Caudovirales | Siphoviridae | | | | | | | | | 90 | 444 |
| Caudovirales | Myoviridae | | Bacteria | Firmicutes_A | Clostridia | | | | | 142 | 494 |
| Caudovirales | Myoviridae | | Bacteria | | | | | | | 143 | 495 |
| Caudovirales | Siphoviridae | | Bacteria | Firmicutes_A | Clostridia | Lachnospirales | Lachnospiraceae | | | 98 | 418 |
| Caudovirales | Siphoviridae | | Bacteria | Firmicutes_A | Clostridia | Lachnospirales | Lachnospiraceae | | | 98 | 418 |
| Caudovirales | Siphoviridae | | Bacteria | Firmicutes_A | Clostridia | Oscillospirales | Ruminococcaceae | Ruminococcus_C | | 319 | 352 |
| Caudovirales | | | Bacteria | Firmicutes_A | Clostridia | Lachnospirales | Lachnospiraceae | Dorea | GUT_GENOME000149 | 44 | 413 |
| Caudovirales | | | Bacteria | Firmicutes_A | Clostridia | Oscillospirales | Oscillospiraceae | ER4 | | 186 | 377 |
| Caudovirales | | | Bacteria | Firmicutes_A | Clostridia | Lachnospirales | Lachnospiraceae | Agathobacter | GUT_GENOME143712 | 104 | 425 |
| Caudovirales | | | Bacteria | Firmicutes_A | Clostridia | Lachnospirales | Lachnospiraceae | Agathobacter | GUT_GENOME143712 | 62 | 425 |
| Caudovirales | | | Bacteria | Firmicutes_A | Clostridia | Lachnospirales | Lachnospiraceae | Agathobacter | GUT_GENOME143712 | 62 | 425 |
| Caudovirales | | | Bacteria | Firmicutes_A | Clostridia | Lachnospirales | Lachnospiraceae | | | 105 | 425 |
| Caudovirales | | | Bacteria | Firmicutes_A | Clostridia | Lachnospirales | Lachnospiraceae | Agathobacter | GUT_GENOME143712 | 104 | 425 |
| Caudovirales | | | Bacteria | Firmicutes_A | Clostridia | Lachnospirales | Lachnospiraceae | | | 105 | 425 |
| Caudovirales | | | Bacteria | Firmicutes_A | Clostridia | Lachnospirales | Lachnospiraceae | Agathobacter | GUT_GENOME143712 | 62 | 425 |
| Caudovirales | | | Bacteria | Firmicutes_A | Clostridia | Lachnospirales | Lachnospiraceae | Agathobacter | GUT_GENOME143712 | 61 | 424 |
| Caudovirales | | | Bacteria | Firmicutes_A | Clostridia | Lachnospirales | Lachnospiraceae | Agathobacter | GUT_GENOME143712 | 103 | 425 |
| Caudovirales | | | Bacteria | Firmicutes_A | Clostridia | Lachnospirales | Lachnospiraceae | Agathobacter | GUT_GENOME143712 | 62 | 425 |
| Caudovirales | | | Bacteria | Firmicutes_A | Clostridia | Lachnospirales | Lachnospiraceae | Agathobacter | GUT_GENOME143712 | 61 | 424 |
| Caudovirales | | | Bacteria | Firmicutes_A | Clostridia | Peptostreptococcales | Peptostreptococcaceae | Intestinibacter | | 163 | 487 |
| Caudovirales | | | Bacteria | Firmicutes_A | Clostridia | Peptostreptococcales | Peptostreptococcaceae | Intestinibacter | | 163 | 487 |
| Caudovirales | | | Bacteria | Firmicutes_A | Clostridia | Peptostreptococcales | Peptostreptococcaceae | Intestinibacter | | 163 | 487 |
| Caudovirales | | | Bacteria | Firmicutes_A | Clostridia | Peptostreptococcales | Peptostreptococcaceae | Intestinibacter | | 163 | 487 |
| Caudovirales | | | Bacteria | Firmicutes_A | Clostridia | Peptostreptococcales | Peptostreptococcaceae | Intestinibacter | | 163 | 487 |
| Caudovirales | | | Bacteria | Firmicutes_A | Clostridia | Peptostreptococcales | Peptostreptococcaceae | Intestinibacter | | 163 | 487 |
| Caudovirales | | | Bacteria | Firmicutes_A | Clostridia | Peptostreptococcales | Peptostreptococcaceae | Intestinibacter | | 163 | 487 |
| Caudovirales | | | Bacteria | Firmicutes_A | Clostridia | Peptostreptococcales | Peptostreptococcaceae | Intestinibacter | | 163 | 487 |
| Caudovirales | | | Bacteria | Firmicutes_A | Clostridia | Peptostreptococcales | Peptostreptococcaceae | Intestinibacter | | 163 | 487 |
| Caudovirales | | | Bacteria | Firmicutes_A | Clostridia | Peptostreptococcales | Peptostreptococcaceae | Intestinibacter | | 163 | 487 |
| Caudovirales | | | | | | | | | | 55 | 423 |
| Caudovirales | | | Bacteria | Firmicutes_A | Clostridia | Clostridiales | Clostridiaceae | Clostridium | GUT_GENOME058212 | 157 | 497 |
| Caudovirales | | | Bacteria | Firmicutes_A | Clostridia | Lachnospirales | Lachnospiraceae | Agathobacter | GUT_GENOME143712 | 184 | 448 |
| Caudovirales | | | Bacteria | Firmicutes_A | Clostridia | Lachnospirales | Lachnospiraceae | Agathobacter | GUT_GENOME143712 | 58 | 426 |
| Caudovirales | | | Bacteria | Firmicutes_A | Clostridia | Lachnospirales | Lachnospiraceae | Agathobacter | GUT_GENOME143712 | 56 | 427 |
| Caudovirales | | | Bacteria | Firmicutes_A | Clostridia | Lachnospirales | Lachnospiraceae | Agathobacter | GUT_GENOME143712 | 58 | 426 |
| Caudovirales | | | Bacteria | Firmicutes_A | Clostridia | Lachnospirales | Lachnospiraceae | Agathobacter | GUT_GENOME143712 | 56 | 427 |
| Caudovirales | | | Bacteria | Firmicutes_A | Clostridia | Lachnospirales | Lachnospiraceae | Agathobacter | GUT_GENOME143712 | 60 | 428 |
| Caudovirales | | | Bacteria | Firmicutes_A | Clostridia | Lachnospirales | Lachnospiraceae | Agathobacter | GUT_GENOME143712 | 59 | 429 |
| Caudovirales | | | Bacteria | Firmicutes_A | Clostridia | Lachnospirales | Lachnospiraceae | Agathobacter | GUT_GENOME143712 | 56 | 427 |
| Caudovirales | | | Bacteria | Firmicutes_A | Clostridia | Lachnospirales | Lachnospiraceae | Agathobacter | GUT_GENOME143712 | 59 | 429 |
| Caudovirales | | | Bacteria | Firmicutes_A | Clostridia | Lachnospirales | Lachnospiraceae | Agathobacter | GUT_GENOME143712 | 58 | 426 |
| Caudovirales | | | Bacteria | Firmicutes_A | Clostridia | Lachnospirales | Lachnospiraceae | Agathobacter | GUT_GENOME143712 | 57 | 426 |
| Caudovirales | | | Bacteria | Firmicutes_A | Clostridia | Lachnospirales | Lachnospiraceae | Agathobacter | GUT_GENOME143712 | 58 | 426 |
| Caudovirales | Siphoviridae | | Bacteria | Firmicutes_A | Clostridia | Peptostreptococcales | Peptostreptococcaceae | Intestinibacter | GUT_GENOME000245 | 122 | 461 |
| Caudovirales | Siphoviridae | | Bacteria | | | | | | | 122 | 461 |
| Caudovirales | | | | | | | | | | 141 | 558 |
| Caudovirales | Siphoviridae | | Bacteria | | | | | | | 123 | 462 |
| Caudovirales | Siphoviridae | | Bacteria | Firmicutes_A | Clostridia | Clostridiales | Clostridiaceae | Clostridium_P | GUT_GENOME142391 | 160 | 514 |
| Caudovirales | Siphoviridae | | Bacteria | Firmicutes_A | Clostridia | | | | | 148 | 516 |
| Caudovirales | Siphoviridae | | Bacteria | Firmicutes_A | Clostridia | Peptostreptococcales | Peptostreptococcaceae | Intestinibacter | GUT_GENOME000245 | 283 | 331 |
| Caudovirales | Siphoviridae | | Bacteria | Firmicutes_A | Clostridia | Peptostreptococcales | Peptostreptococcaceae | | | 212 | 486 |
| Caudovirales | | | Bacteria | Firmicutes_A | Clostridia | Peptostreptococcales | Peptostreptococcaceae | Intestinibacter | | 210 | 502 |
| Caudovirales | Myoviridae | | Bacteria | Firmicutes_A | Clostridia | Peptostreptococcales | Peptostreptococcaceae | Intestinibacter | GUT_GENOME000245 | 156 | 522 |
| Caudovirales | | | Bacteria | Firmicutes_A | Clostridia | Peptostreptococcales | Peptostreptococcaceae | Intestinibacter | GUT_GENOME000245 | 149 | 517 |
| Caudovirales | Siphoviridae | | Bacteria | Firmicutes_A | Clostridia | Peptostreptococcales | Peptostreptococcaceae | Intestinibacter | GUT_GENOME000245 | 147 | 501 |
| Caudovirales | | | Bacteria | Firmicutes_A | Clostridia | Peptostreptococcales | Peptostreptococcaceae | Intestinibacter | GUT_GENOME000245 | 150 | 518 |
| Caudovirales | | | Bacteria | Firmicutes_A | Clostridia | Peptostreptococcales | Peptostreptococcaceae | Intestinibacter | GUT_GENOME000245 | 150 | 518 |
| Caudovirales | | | Bacteria | Firmicutes_A | Clostridia | Peptostreptococcales | Peptostreptococcaceae | Intestinibacter | GUT_GENOME000245 | 150 | 518 |
| Caudovirales | | | Bacteria | Firmicutes_A | Clostridia | Peptostreptococcales | Peptostreptococcaceae | Intestinibacter | GUT_GENOME000245 | 150 | 518 |
| Caudovirales | | | Bacteria | Firmicutes_A | Clostridia | Peptostreptococcales | Peptostreptococcaceae | Intestinibacter | GUT_GENOME000245 | 150 | 518 |
| Caudovirales | | | Bacteria | Firmicutes_A | Clostridia | Peptostreptococcales | Peptostreptococcaceae | Intestinibacter | GUT_GENOME000245 | 150 | 518 |
| Caudovirales | Siphoviridae | | Bacteria | Firmicutes_A | Clostridia | Peptostreptococcales | Peptostreptococcaceae | Terrisporobacter | GUT_GENOME000534 | 38 | 407 |
| Caudovirales | | | Bacteria | Firmicutes_A | Clostridia | Peptostreptococcales | Peptostreptococcaceae | Intestinibacter | GUT_GENOME000245 | 151 | 521 |
| Caudovirales | Myoviridae | | Bacteria | Firmicutes_A | Clostridia | Peptostreptococcales | Peptostreptococcaceae | Intestinibacter | GUT_GENOME000245 | 153 | 519 |
| Caudovirales | | | Bacteria | Firmicutes_A | Clostridia | Peptostreptococcales | Peptostreptococcaceae | Intestinibacter | GUT_GENOME000245 | 151 | 521 |
| Caudovirales | Myoviridae | | Bacteria | Firmicutes | Bacilli | RF39 | CAG-1000 | CAG-1000 | GUT_GENOME273237 | 152 | 520 |
| Caudovirales | Myoviridae | | | | | | | | | 153 | 519 |
| Caudovirales | Myoviridae | | Bacteria | Firmicutes | Bacilli | RF39 | CAG-1000 | CAG-1000 | GUT_GENOME273237 | 154 | 519 |
| Caudovirales | Myoviridae | | | | | | | | | 153 | 519 |

TABLE 8
HAD1 IMG homologs

| | DNA sequence | AA sequence |
|---|---|---|
| Species | SEQ ID NO | SEA ID NO |
| Bacillus virus HoodyT | 592 | 605 |
| Paenibacillus pinihumi | 594 | 595 |
| Bacillus toyonensis | 593 | 609 |
| Paenibacillus pinihumi | 594 | 595 |
| Bacillus virus Evoli | 588 | 607 |
| Paenibacillus odorifer | 580 | 603 |
| Bacillus virus Bastille | 587 | 608 |
| Bacillus virus CAM003 | 586 | 606 |
| Bacillus virus Troll | 584 | 600 |
| Fontibacillus phaseoli | 578 | 604 |
| Bacillus phage Phrodo | 582 | 599 |
| Bacillus toyonensis | 593 | 609 |
| Bacillus virus Riley | 583 | 600 |
| Paenibacillus sp. FSL H8-237 | 580 | 603 |
| Paenibacillus sp. FSL R7-269 | 579 | 602 |
| Bacillus virus AvesoBmore | 583 | 600 |
| Bacillus virus BCP78 | 590 | 596 |
| Paenibacillus odorifer | 580 | 603 |
| Bacillus virus Spock | 585 | 601 |
| Bacillus virus B4 | 591 | 610 |
| Bacillus virus Bigbertha | 581 | 598 |
| Bacillus toyonensis | 589 | 597 |

TABLE 9
GAD1 IMG homologs

| | DNA | AA |
|---|---|---|
| | sequence | sequence |
| | SEQ ID | SEQ ID |
| Species | NO | NO |
| Clostridioides difficile | 643 | 719 |
| Bacillus velezensis | 624 | 701 |
| Paenibacillus sp. HJL G12 | 669 | 677 |
| Xenorhabdus griffiniae | 649 | 684 |
| Bacillus subtilis | 622 | 709 |
| Bacillus subtilis | 631 | 703 |
| Bacillus vallismortis | 616 | 694 |
| Bacillus subtilis | 623 | 710 |
| Bacillus amyloliquefaciens | 625 | 700 |
| Proteus sp. G2664 | 651 | 686 |
| Bacillus subtilis | 626 | 698 |
| Cedecea lapagei | 655 | 680 |
| Bacillus subtilis | 621 | 705 |
| Proteus sp. G2664 | 651 | 686 |
| Xenorhabdus sp. KK7.4 | 653 | 682 |
| Bacillus subtilis | 629 | 708 |
| Bacillus velezensis | 615 | 696 |
| Bacillus subtilis | 620 | 706 |
| Bacillus subtilis | 671 | 679 |
| Bacillus subtilis | 628 | 707 |
| unclassified | 620 | 706 |
| Photorhabdus khanii | 652 | 683 |
| Shewanella sp. phage 1/4 | 644 | 726 |
| Bacillus vallismortis | 616 | 694 |
| Bacillus nakamurai | 612 | 716 |
| Bacillus subtilis | 668 | 676 |
| Nitrobacter hamburgensis | 634 | 711 |
| Bacillus amyloliquefaciens | 629 | 708 |
| Proteus sp. G2664 | 651 | 686 |
| Proteus sp. G2670 | 651 | 686 |
| Blautia wexlerae | 663 | 733 |
| Clostridioides difficile | 642 | 720 |
| Bacillus amyloliquefaciens | 629 | 708 |
| Bacillus subtilis | 668 | 676 |
| Lachnospiraceae bacterium Marseille-P3773 | 674 | 675 |
| Enterobacter roggenkampii | 645 | 723 |
| Paenibacillus sp. EKM202P | 672 | 678 |
| Cedecea lapagei | 654 | 681 |
| Xenorhabdus sp. GDc328 | 649 | 684 |
| Pectinatus haikarae | 611 | 715 |
| Bacillus subtilis | 632 | 704 |
| Bacillus amyloliquefaciens | 633 | 693 |
| Proteus sp. G2670 | 651 | 686 |
| Bacillus amyloliquefaciens | 633 | 693 |
| Photorhabdus temperata | 652 | 683 |
| Escherichia coli | 647 | 725 |
| [Clostridium] methoxybenzovorans | 670 | 718 |
| Proteus sp. G2661 | 650 | 685 |
| Proteus sp. G2664 | 651 | 686 |
| Bacillus amyloliquefaciens | 633 | 693 |
| Bacillus subtilis | 630 | 702 |
| Bacillus xiamenensis | 635 | 695 |
| Bacillus amyloliquefaciens | 629 | 708 |
| Bacillus subtilis | 622 | 709 |
| Bacillus camelliae | 659 | 730 |
| Bacillus amyloliquefaciens | 629 | 708 |
| Bacillus subtilis | 648 | 717 |
| Bacillus amyloliquefaciens | 627 | 699 |
| Bacillus amyloliquefaciens | 633 | 693 |
| Bacillus subtilis | 623 | 710 |
| Proteus sp. G2670 | 651 | 686 |
| Proteus sp. G2670 | 651 | 686 |
| Bacillus atrophaeus | 636 | 697 |
| Brevibacillus gelatini | 617 | 689 |
| Clostridioides difficile | 642 | 720 |
| Bacillus inaquosorum | 620 | 706 |

TABLE 10
GAD1 MGV homologs

| | | | | | | | | | | DNA | AA |
|---|---|---|---|---|---|---|---|---|---|---|---|
| | | | | | | | | | | sequence | sequence |
| | | | | | | | | | | SEQ | SEQ |
| ictv_order | ictv_family | ictv_genus | host_domain | host_phylum | host_class | host_order | host_family | host_genus | host_species | ID NO | ID NO |
| Caudovirales | | Light- | | | | | | | | 656 | 727 |
| | | bulb | | | | | | | | | |
| | | virus | | | | | | | | | |
| Caudovirales | Siphoviridae | | Bacteria | Firmicutes_A | Clostridia | Lachnospirales | Lachnospiraceae | | | 662 | 736 |
| Caudovirales | Siphoviridae | | Bacteria | Firmicutes_A | Clostridia | Lachnospirales | Lachnospiraceae | | | 666 | 732 |
| Caudovirales | Siphoviridae | | Bacteria | Firmicutes_A | Clostridia | Lachnospirales | Lachnospiraceae | | | 660 | 737 |
| Caudovirales | | | Bacteria | Proteobacteria | Gammaproteo- | Enterobacterales | Enterobacteriaceae | Escherichia | GUT_GENOME144544 | 646 | 724 |
| | | | | | bacteria | | | | | | |
| Caudovirales | | | Bacteria | Firmicutes_A | Clostridia | Lachnospirales | Lachnospiraceae | | | 673 | 687 |
| Caudovirales | | | Bacteria | Firmicutes_A | Clostridia | Lachnospirales | Lachnospiraceae | | | 673 | 687 |
| Caudovirales | | | Bacteria | Firmicutes_A | Clostridia | Lachnospirales | Lachnospiraceae | | | 664 | 734 |
| Caudovirales | | | Bacteria | Firmicutes_A | Clostridia | Lachnospirales | Lachnospiraceae | | | 664 | 734 |
| Caudovirales | | | Bacteria | Firmicutes_A | Clostridia | Lachnospirales | Lachnospiraceae | | | 664 | 734 |
| Caudovirales | Siphoviridae | | Bacteria | Firmicutes_A | Clostridia | Lachnospirales | Lachnospiraceae | Blautia_A | | 657 | 729 |
| Caudovirales | Siphoviridae | | Bacteria | Firmicutes_A | Clostridia | Lachnospirales | Lachnospiraceae | Blautia_A | | 665 | 731 |
| Caudovirales | | | Bacteria | Firmicutes_A | Clostridia | Lachnospirales | Lachnospiraceae | | | 667 | 688 |
| Caudovirales | | | Bacteria | Firmicutes_A | Clostridia | Lachnospirales | Lachnospiraceae | | | 667 | 688 |
| Caudovirales | Siphoviridae | | Bacteria | Firmicutes_A | Clostridia | Lachnospirales | Lachnospiraceae | | | 658 | 728 |
| Caudovirales | | | Bacteria | Firmicutes_A | Clostridia | Lachnospirales | Lachnospiraceae | | | 658 | 728 |
| Caudovirales | | | Bacteria | Firmicutes_A | Clostridia | Lachnospirales | Lachnospiraceae | | | 661 | 735 |
| Caudovirales | Siphoviridae | | Bacteria | | | | | | | 637 | 713 |
| Caudovirales | Siphoviridae | | Bacteria | Firmicutes_A | Clostridia | Peptostreptococcales | Peptostreptococcaceae | Intestinibacter | GUT_GENOME065434 | 638 | 713 |
| Caudovirales | Siphoviridae | | Bacteria | Firmicutes_A | Clostridia | Oscillospirales | Ruminococcaceae | CAG-353 | GUT_GENOME000448 | 640 | 722 |
| Caudovirales | Siphoviridae | | Bacteria | Firmicutes_A | Clostridia | | | | | 618 | 690 |
| Caudovirales | Siphoviridae | | Bacteria | Firmicutes_A | Clostridia | Oscillospirales | Ruminococcaceae | CAG-353 | GUT_GENOME000448 | 618 | 690 |
| Caudovirales | Siphoviridae | | Bacteria | Firmicutes_A | Clostridia | Peptostreptococcales | Peptostreptococcaceae | Intestinibacter | GUT_GENOME065434 | 639 | 714 |
| Caudovirales | Siphoviridae | | Bacteria | Firmicutes_A | Clostridia | | | | | 619 | 712 |
| Caudovirales | Siphoviridae | | Bacteria | Firmicutes_A | Clostridia | Oscillospirales | Ruminococcaceae | CAG-353 | GUT_GENOME000448 | 641 | 721 |
| Caudovirales | Siphoviridae | | Bacteria | Firmicutes | Bacilli | RF39 | | | | 613 | 691 |
| Caudovirales | Siphoviridae | | Bacteria | Firmicutes | Bacilli | RF39 | | | | 613 | 691 |
| Caudovirales | Siphoviridae | | Bacteria | Firmicutes | Bacilli | RF39 | | | | 614 | 692 |

TABLE 11
TAD2 IMG homologs

| | DNA | AA |
|---|---|---|
| | sequence | sequence |
| | SEQ ID | SEQ ID |
| Species | NO | NO |
| Bacillus virus SPO1 | 757 | 1046 |
| Maridesulfovibrio bastinii DSM 16055 | 758 | 1047 |
| Ruminococcus callidus ATCC 27760 | 759 | 1048 |
| Nitrosospira sp. 1 Nsp1 | 760 | 1049 |
| Escherichia coli AIEC_UM149 | 761 | 1050 |
| Myroides odoratus XSfan | 762 | 1051 |
| Epibacterium mobile 45A6 | 763 | 1052 |
| Lactiplantibacillus plantarum VBLLa 11-47 | 764 | 1053 |
| Myroides odoratus DSM 2801 | 765 | 1054 |
| Synechococcus sp. PCC 6312 | 766 | 1055 |
| Clostridium pasteurianum BC1 | 767 | 1056 |
| Bacteroides xylanisolvens NLAE-zl-P352 | 768 | 1057 |
| Bacteroides xylanisolvens NLAE-zl-P393 | 780 | 1057 |
| Bacteroides xylanisolvens NLAE-zl-P727 | 780 | 1057 |
| Bacteroides xylanisolvens NLAE-zl-P732 | 780 | 1057 |
| Cohnella panacarvi Gsoil 349, DSM 18696 | 781 | 1058 |
| Rudanella lutea DSM 19387 | 782 | 1059 |
| Bacillus sp. 105MF | 783 | 1060 |
| Thermomonas fusca DSM 15424 | 784 | 1061 |
| Aurantimonas coralicida DSM 14790 | 785 | 1062 |
| Halomonas jeotgali Hwa | 786 | 1063 |
| Sporomusa ovata DSM 2662 | 787 | 1064 |
| Clostridium cadaveris AGR2141 | 788 | 1065 |
| Oceanicola sp. S124 | 789 | 1066 |
| Ruminococcaceae bacterium LM158 | 790 | 1067 |
| Methylobacterium sp. EUR3 AL-11 | 791 | 1068 |
| Microvirgula aerodenitrificans DSM 15089 | 792 | 1069 |
| Acinetobacter tandoii DSM 14970 | 793 | 1070 |
| Megasphaera elsdenii T81 | 794 | 1071 |
| Psychrobacter phenylpyruvicus DSM 7000 | 795 | 1072 |
| Liquorilactobacillus nagelii DSM 13675 | 796 | 1073 |
| Methylomicrobium agile ATCC 35068 | 797 | 1074 |
| Methylomicrobium agile ATCC 35068 | 798 | 1075 |
| Azoarcus communis DSM 12120 | 799 | 1076 |
| Methylobacterium sp. UNCCL110 | 800 | 1077 |
| Marinomonas polaris DSM 16579 | 801 | 1078 |
| Rhizobium sp. CF258 | 802 | 1079 |
| Clostridium intestinale DSM 6191 | 803 | 1080 |
| Anaerosporobacter mobilis DSM 15930 | 804 | 1081 |
| Mameliella alba DSM 26384 | 805 | 1082 |
| Methylobacterium sp. UNCCL125 | 800 | 1077 |
| Ancylobacter rudongensis CGMCC 1.1761 | 806 | 1083 |
| Klebsiella pneumoniae 440_1540 | 807 | 1084 |
| Klebsiella pneumoniae 646_1568 | 807 | 1084 |
| Klebsiella pneumoniae 500_1420 | 807 | 1084 |
| Klebsiella pneumoniae 540_1460 | 808 | 1085 |
| Klebsiella pneumoniae 361_1301 | 807 | 1084 |
| Yersinia pseudotuberculosis B-7195 | 809 | 1086 |
| Levilactobacillus brevis ATCC 14869 | 810 | 1087 |
| Paenibacillus gorillae G1 | 811 | 1088 |
| Pasteurella multocida multocida P1062 | 812 | 1089 |
| Campylobacter concisus UNSWCS | 813 | 1090 |
| Prevotella disiens DNF00882 | 814 | 1091 |
| Campylobacter concisus UNSW2 | 815 | 1092 |
| Methylobacterium sp. UNCCL126 | 842 | 1077 |
| Novosphingobium pentaromativorans US6-1 | 816 | 1093 |
| Escherichia coli 2-474-04_S1_C1 | 817 | 1094 |
| Escherichia coli 4-203-08_S1_C1 | 818 | 1095 |
| Klebsiella pneumoniae UCI 61 | 796 | 1085 |
| Klebsiella pneumoniae BWH 47 | 796 | 1085 |
| Klebsiella pneumoniae UCI 55 | 796 | 1085 |
| Klebsiella pneumoniae MGH-73 | 796 | 1085 |
| Klebsiella pneumoniae CHS 31 | 796 | 1085 |
| Klebsiella pneumoniae UCI 59 | 795 | 1084 |
| Klebsiella pneumoniae UCI 63 | 795 | 1084 |
| Klebsiella pneumoniae MGH-79 | 796 | 1085 |
| Klebsiella pneumoniae KP4-R | 796 | 1085 |
| Bacillus thuringiensis NBIN-866 | 807 | 1096 |
| Bacillus thuringiensis sv. kurstaki HD-1 | 808 | 1097 |
| Bacillus thuringiensis sv. kurstaki HD-1 | 809 | 1098 |
| Clostridium botulinum sv. C/D BKT75002 | 810 | 1099 |
| Klebsiella pneumoniae 7699 | 795 | 1084 |
| Lactiplantibacillus paraplantarum L-ZS9 | 811 | 1100 |
| Burkholderia sp. YR281 | 812 | 1101 |
| Salipiger marinus DSM 26424 | 813 | 1102 |
| Maribius pelagius DSM 26893 | 814 | 1103 |
| bacterium YEK0313 | 815 | 1104 |
| Xenorhabdus bovienii oregonense | 816 | 1105 |
| Trichococcus collinsii DSM 14526 | 817 | 1106 |
| Klebsiella pneumoniae pneumoniae ST258-K26BO | 796 | 1085 |
| Klebsiella pneumoniae pneumoniae ST258-K28BO | 796 | 1085 |
| Clostridium jeddahense JCD | 818 | 1107 |
| Paenibacillus durus ATCC 35681 | 819 | 1108 |
| Lysinibacillus boronitolerans | 820 | 1109 |
| JCM 21713 = 10a = NBRC 103108 | | |
| Klebsiella pneumoniae pneumoniae KPNIH30 | 795 | 1084 |
| Pontibacillus litoralis JSM 072002 | 821 | 1110 |
| Bacillus cereus 03BB87 | 822 | 1111 |
| Yersinia pseudotuberculosis 4284 | 797 | 1086 |
| Klebsiella pneumoniae pneumoniae KPNIH32 | 796 | 1085 |
| Bacillus thuringiensis HD1002 | 823 | 1112 |
| Bacillus thuringiensis HD1002 | 824 | 1113 |
| Bacillus thuringiensis HD1002 | 825 | 1114 |
| Bacillus thuringiensis HD1002 | 826 | 1115 |
| Paenibacillus polymyxa NRRL B-30509 | 827 | 1116 |
| Lactiplantibacillus herbarum TCF032-E4 | 828 | 1117 |
| Yersinia pseudotuberculosis IP 32953 | 797 | 1086 |
| Lactiplantibacillus plantarum PS128 | 828 | 1117 |
| Neisseria arctica KH1503 | 829 | 1118 |
| Escherichia coli JT2 | 830 | 1094 |
| Methyloceanibacter caenitepidi Gela4 | 831 | 1119 |
| Bacillus thuringiensis sv. galleriae 4G5 | 808 | 1097 |
| Bacillus thuringiensis sv. galleriae 4G5 | 809 | 1098 |
| Bacillus thuringiensis sv. galleriae 4G5 | 808 | 1097 |
| Bacillus thuringiensis sv. galleriae 4G5 | 809 | 1098 |
| Bacillus sp. GeD10 | 832 | 1120 |
| Tenacibaculum sp. Mar_2009_124 | 833 | 1121 |
| Bacillus cereus G9241 | 822 | 1111 |
| Bacillus thuringiensis sv. Kurstaki HD 1 | 809 | 1098 |
| Bacillus thuringiensis sv. Kurstaki HD 1 | 808 | 1097 |
| Klebsiella pneumoniae pneumoniae KPNIH33 | 796 | 1085 |
| Levilactobacillus brevis DmCS_003 | 834 | 1122 |
| Levilactobacillus brevis DmCS_003 | 835 | 1123 |
| Escherichia coli G3/10 | 836 | 1124 |
| Tatumella morbirosei LMG 23360 | 837 | 1125 |
| Bacillus thuringiensis israelensis ATCC 35646 | 823 | 1112 |
| Escherichia coli ISC56 | 797 | 1085 |
| Levilactobacillus brevis WK12 | 838 | 1126 |
| Lactiplantibacillus pentosus FL0421 | 839 | 1127 |
| Lactiplantibacillus pentosus FL0421 | 840 | 1128 |
| Variovorax sp. 278MFTsu5.1 | 841 | 1129 |
| Methylobacterium sp. CL129 | 788 | 1077 |
| Paenibacillus sp. Soil724D2 | 842 | 1130 |
| Bacillus sp. Root11 | 824 | 1113 |
| Bacillus sp. Root11 | 823 | 1112 |
| Bacillus sp. Root11 | 826 | 1115 |
| Bacillus sp. Root11 | 825 | 1114 |
| Bacillus sp. Root131 | 824 | 1113 |
| Bacillus sp. Root131 | 823 | 1112 |
| Bacillus sp. Root131 | 826 | 1115 |
| Bacillus sp. Root131 | 825 | 1114 |
| Sphingobium sp. Leaf26 | 843 | 1131 |
| Pseudomonas sp. Leaf127 | 844 | 1132 |
| Comamonas thiooxydans DS1 | 845 | 1133 |
| Lactiplantibacillus plantarum Nizo2877 | 846 | 1134 |
| Klebsiella pneumoniae pneumoniae KK207/1 | 796 | 1085 |
| Bacillus thuringiensis sv. Morrisoni HD 600 | 847 | 1135 |
| Bacillus thuringiensis 147 | 824 | 1113 |
| Bacillus thuringiensis 147 | 823 | 1112 |
| Comamonas testosteroni KF712 | 848 | 1136 |
| Lacticaseibacillus paracasei NRIC 0644 | 849 | 1137 |
| Haemophilus influenzae HI1426 | 850 | 1138 |
| Bacillus thuringiensis AK47 | 809 | 1098 |
| Bacillus thuringiensis AK47 | 808 | 1097 |
| Bacillus cereus B4158 | 851 | 1139 |
| Bacillus cereus B4158 | 823 | 1112 |
| Bacillus cereus B4158 | 808 | 1097 |
| Bacillus cereus B4158 | 809 | 1098 |
| Bacillus cereus 6/27/S | 809 | 1098 |
| Bacillus cereus 6/27/S | 808 | 1097 |
| Bacillus cereus 6/27/S | 852 | 1140 |
| Bacillus cereus 6/27/S | 852 | 1140 |
| Mesorhizobium plurifarium ORS1032 | 853 | 1141 |
| Klebsiella pneumoniae MRSN 6902 | 795 | 1084 |
| Bacillus cereus B4080 | 854 | 1142 |
| Bacillus cereus RIVM BC 934 | 809 | 1098 |
| Bacillus cereus RIVM BC 934 | 808 | 1097 |
| Bacillus cereus RIVM BC 934 | 852 | 1140 |
| Bacillus cereus RIVM BC 934 | 852 | 1140 |
| Betaproteobacteria FNEB7 bin_39 | 855 | 1143 |
| Bacteroidetes FNEB6 bin_58 | 856 | 1144 |
| Bacillus thuringiensis BMB3201 | 851 | 1139 |
| Bacillus thuringiensis BMB3201 | 823 | 1112 |
| Comamonas thiooxydans KY3 | 857 | 1145 |
| Lactiplantibacillus plantarum HFC8 | 858 | 1146 |
| Lacticaseibacillus paracasei NRIC 1917 | 849 | 1137 |
| Bacillus thuringiensis YC-10 | 808 | 1097 |
| Bacillus thuringiensis YC-10 | 809 | 1098 |
| Clostridium innocuum NLAE-zl-C381 | 859 | 1147 |
| Klebsiella pneumoniae UCI81 | 796 | 1085 |
| Klebsiella pneumoniae BWH53 | 796 | 1085 |
| Klebsiella pneumoniae 50518740 | 796 | 1085 |
| Klebsiella pneumoniae S_KpVA-11 | 796 | 1085 |
| Klebsiella oxytoca CHS143 | 860 | 1148 |
| Loigolactobacillus bifermentans DSM 20003 | 861 | 1149 |
| Liquorilactobacillus nagelii DSM 13675 | 784 | 1073 |
| Klebsiella pneumoniae S_KpVA-7 | 796 | 1085 |
| Aurantimonas coralicida DSM 14790 | 773 | 1062 |
| Lactococcus lactis lactis M20 | 862 | 1150 |
| Klebsiella pneumoniae S_KpVA-13 | 796 | 1085 |
| Klebsiella pneumoniae K52-74 | 796 | 1085 |
| Klebsiella pneumoniae S_KpVA-9 | 796 | 1085 |
| Klebsiella pneumoniae S_KpVA-4 | 796 | 1085 |
| Bacillus amyloliquefaciens JRS8 | 863 | 1151 |
| Klebsiella pneumoniae S_KpVA-12 | 796 | 1085 |
| Klebsiella pneumoniae S_KpVA-5 | 796 | 1085 |
| Klebsiella pneumoniae 50675619 | 864 | 1152 |
| Klebsiella pneumoniae K52-36 | 796 | 1085 |
| Mameliella alba CGMCC 1.7290 | 793 | 1082 |
| Klebsiella pneumoniae K52-10 | 796 | 1085 |
| Klebsiella pneumoniae UCI91 | 796 | 1085 |
| Escherichia coli 165 | 865 | 1153 |
| Klebsiella pneumoniae S_KpVA-6 | 796 | 1085 |
| Acinetobacter baumannii ABBL071 | 866 | 1154 |
| Salmonella enterica enterica sv. Weltevreden | 867 | 1094 |
| 2013 2776 | | |
| Klebsiella pneumoniae 50834782 | 796 | 1085 |
| Klebsiella pneumoniae K47-25 | 796 | 1085 |
| Klebsiella pneumoniae 50509588 | 796 | 1085 |
| Klebsiella pneumoniae S_KpVA-1 | 796 | 1085 |
| Lactiplantibacillus plantarum 38 | 828 | 1117 |
| Lactiplantibacillus plantarum CMPG5300 | 868 | 1155 |
| Acinetobacter tandoii KCTC 12417 | 781 | 1070 |
| Klebsiella pneumoniae FDAARGOS_91 | 869 | 1156 |
| Klebsiella pneumoniae FDAARGOS_91 | 795 | 1084 |
| Klebsiella pneumoniae K54-05 | 796 | 1085 |
| Klebsiella pneumoniae K48-58 | 796 | 1085 |
| Klebsiella pneumoniae 50732159 | 796 | 1085 |
| Klebsiella pneumoniae K66-62 | 796 | 1085 |
| Fructilactobacillus fructivorans ATCC 27394 | 870 | 1157 |
| Klebsiella pneumoniae S_50BG | 796 | 1085 |
| Bacillus thuringiensis YWC2-8 | 808 | 1097 |
| Bacillus thuringiensis YWC2-8 | 809 | 1098 |
| Klebsiella pneumoniae pneumoniae ATCC 13883 | 796 | 1085 |
| Klebsiella pneumoniae S_103BO | 796 | 1085 |
| Mesorhizobium sp. LSHC414A00 | 871 | 1158 |
| Klebsiella pneumoniae S_12PV | 796 | 1085 |
| Klebsiella pneumoniae S_86SGR | 796 | 1085 |
| Levilactobacillus brevis DSM 20054 | 798 | 1087 |
| Klebsiella pneumoniae S_24PV | 796 | 1085 |
| Nitrosovibrio sp. Nv6 | 872 | 1159 |
| Klebsiella pneumoniae S_KpVA-10 | 796 | 1085 |
| Phaeobacter sp. S60 | 873 | 1160 |
| Klebsiella pneumoniae pneumoniae TGH8 | 796 | 1085 |
| Lactobacillus nodensis NBRC 107160 | 874 | 1161 |
| Klebsiella variicola MGH114 | 875 | 1162 |
| Klebsiella pneumoniae S_102BO | 796 | 1085 |
| Klebsiella pneumoniae S_104BO | 796 | 1085 |
| Klebsiella pneumoniae S_23PV | 796 | 1085 |
| Klebsiella pneumoniae S_30BO | 796 | 1085 |
| Klebsiella pneumoniae S_43AVR | 796 | 1085 |
| Klebsiella pneumoniae S_73RE | 796 | 1085 |
| Klebsiella pneumoniae KP-45D | 876 | 1163 |
| Klebsiella pneumoniae M098451 | 796 | 1085 |
| Companilactobacillus farciminis 8-2 | 877 | 1164 |
| Magnetospirillum sp. XM-1 | 878 | 1165 |
| Acinetobacter baumannii LAC-4 | 879 | 1166 |
| Klebsiella pneumoniae 32192 | 795 | 1084 |
| Bacillus thuringiensis sv. alesti BGSC 4C1 | 880 | 1167 |
| Sporosarcina psychrophila DSM 6497 | 88 | 1168 |
| Klebsiella pneumoniae pneumoniae TGH10 | 796 | 1085 |
| Klebsiella pneumoniae FDAARGOS_127 | 795 | 1084 |
| Klebsiella pneumoniae 38547 | 796 | 1085 |
| Lactobacillus nodensis DSM 19682 | 874 | 1161 |
| Klebsiella pneumoniae 160_1080 1134709401395 | 795 | 1084 |
| Klebsiella variicola 06-268 | 882 | 1169 |
| Klebsiella pneumoniae S_42AVR | 796 | 1085 |
| Escherichia coli AZ71 | 883 | 1170 |
| Klebsiella pneumoniae K52-43 | 796 | 1085 |
| Klebsiella pneumoniae S_75RE | 796 | 1085 |
| Stenotrophomonas maltophilia LMG 22072 | 884 | 1171 |
| Klebsiella pneumoniae K66-73 | 796 | 1085 |
| Escherichia coli AY62 | 885 | 1172 |
| Klebsiella pneumoniae S_KpVA-2 | 796 | 1085 |
| Escherichia coli 505545 | 830 | 1094 |
| Klebsiella pneumoniae S_KpVA-14 | 796 | 1085 |
| Klebsiella pneumoniae S_72RE | 796 | 1085 |
| Acinetobacter baumannii ABBL070 | 866 | 1154 |
| Acinetobacter baumannii ABBL070 | 866 | 1154 |
| Acinetobacter baumannii ABBL070 | 866 | 1154 |
| Klebsiella pneumoniae S_74RE | 796 | 1085 |
| Klebsiella pneumoniae KLP41 | 795 | 1084 |
| Rhodobacter sp. JGI CrystG Aug3-1-F17 | 886 | 1173 |
| (unscreened) | | |
| Companilactobacillus bobalius DSM 19674 | 887 | 1174 |
| Salmonella enterica enterica sv. Weltevreden | 888 | 1094 |
| 08 2437 | | |
| Klebsiella pneumoniae S_KpVA-8 | 796 | 1085 |
| Klebsiella pneumoniae S_89SGR | 796 | 1085 |
| Salmonella enterica enterica sv. Weltevreden 840K | 888 | 1094 |
| Klebsiella pneumoniae K53-64 | 796 | 1085 |
| Klebsiella pneumoniae S_87SGR | 796 | 1085 |
| Klebsiella pneumoniae S_88SGR | 796 | 1085 |
| Klebsiella pneumoniae S_KpVA-15 | 796 | 1085 |
| Klebsiella pneumoniae S_KpVA-16 | 796 | 1085 |
| Klebsiella pneumoniae S_90SGR | 796 | 1085 |
| Klebsiella pneumoniae S_71RE | 796 | 1085 |
| Klebsiella pneumoniae S_KpVA-3 | 796 | 1085 |
| Mesorhizobium sp. LNJC391B00 | 889 | 1175 |
| Escherichia coli 503130_aEPEC | 830 | 1094 |
| Liquorilactobacillus uvarum DSM 19971 | 890 | 1176 |
| Lactiplantibacillus plantarum plantarum ATCC | 846 | 1134 |
| 14917 | | |
| Lactiplantibacillus plantarum 8 RA-3 | 828 | 1117 |
| Klebsiella pneumoniae S_101BO | 796 | 1085 |
| Klebsiella pneumoniae S_11PV | 796 | 1085 |
| Klebsiella pneumoniae S_13PV | 796 | 1085 |
| Klebsiella pneumoniae S_29BO | 796 | 1085 |
| Klebsiella pneumoniae S_31AVR | 796 | 1085 |
| Klebsiella pneumoniae S_48AVR | 796 | 1085 |
| Klebsiella pneumoniae S_44AVR | 796 | 1085 |
| Klebsiella pneumoniae S_54BG | 796 | 1085 |
| Klebsiella pneumoniae S_56BG | 796 | 1085 |
| Klebsiella pneumoniae S_57BG | 796 | 1085 |
| Klebsiella pneumoniae S_58BG | 796 | 1085 |
| Klebsiella pneumoniae S_97SGR | 796 | 1085 |
| Klebsiella pneumoniae pneumoniae | 891 | 1156 |
| ST323:941530379 | | |
| Bacillus thuringiensis GOE1 | 892 | 1177 |
| Bacillus thuringiensis GOE2 | 892 | 1177 |
| Klebsiella pneumoniae S_95SGR | 876 | 1163 |
| Neorhizobium galegae bv. orientalis HAMBI 2605 | 893 | 1178 |
| Yersinia similis Y228 | 894 | 1179 |
| Alphaproteobacteria bacterium | 895 | 1180 |
| RIFCSPHIGHO2_12_FULL_63_12 | | |
| Alphaproteobacteria bacterium | 896 | 1181 |
| RIFCSPHIGHO2_12_FULL_63_12 | | |
| Escherichia coli E830 | 888 | 1094 |
| Klebsiella pneumoniae MRSN6920 | 795 | 1084 |
| Klebsiella pneumoniae MRSN8157 | 795 | 1084 |
| Klebsiella pneumoniae M097273 | 796 | 1085 |
| Klebsiella pneumoniae M098513 | 796 | 1085 |
| Klebsiella pneumoniae M098440 | 796 | 1085 |
| Klebsiella pneumoniae M098441 | 796 | 1085 |
| Klebsiella pneumoniae M098442 | 796 | 1085 |
| Klebsiella pneumoniae M104145 | 796 | 1085 |
| Bacillus glycinifermentans KJ-17 | 897 | 1182 |
| Bacillus glycinifermentans GO-13 | 897 | 1182 |
| Lysinibacillus sp. F5 | 898 | 1183 |
| Klebsiella oxytoca CAV1335 | 899 | 1184 |
| Klebsiella oxytoca CAV1099 | 899 | 1184 |
| Klebsiella pneumoniae CAV1016 | 900 | 1185 |
| Klebsiella pneumoniae KPC-3 | 796 | 1085 |
| Acinetobacter baumannii LAC4 | 879 | 1166 |
| Tardibacter chloracetimidivorans JJ-A5 | 901 | 1186 |
| Klebsiella pneumoniae KPNIH36 | 796 | 1085 |
| Klebsiella pneumoniae CAV1453 | 795 | 1084 |
| Enterobacter kobei DSM 13645 | 902 | 1187 |
| Salmonella enterica enterica sv. Newport | 903 | 1188 |
| CFSAN003890 | | |
| Secundilactobacillus paracollinoides TMW 1.1994 | 904 | 1189 |
| Levilactobacillus brevis D6 | 905 | 1190 |
| Yersinia pseudotuberculosis IP33038 | 797 | 1086 |
| Yersinia mollaretii IP22404 | 906 | 1191 |
| Yersinia kristensenii IP27925 | 907 | 1192 |
| Clostridium botulinum 211 | 908 | 1193 |
| Cupriavidus sp. USMAA2-4 | 909 | 1194 |
| Haloactinopolyspora alba DSM 45211 | 910 | 1195 |
| Actinoplanes italicus DSM 43146 | 911 | 1196 |
| Bacillus sp. JCM 19041 | 912 | 1197 |
| Lysinibacillus boronitolerans 10a | 820 | 1109 |
| Dysgonomonas alginatilytica DSM 100214 | 913 | 1198 |
| Mongoliibacter ruber DSM 27929 | 914 | 1199 |
| Psychrobacter phenylpyruvicus NBRC 102152 | 783 | 1072 |
| Novosphingobium rosa NBRC 15208 | 915 | 1200 |
| Lactiplantibacillus plantarum Lp1610 | 916 | 1201 |
| Paenibacillus sp. JCM 16163 | 917 | 1202 |
| Escherichia coli CVM N33922PS | 918 | 1203 |
| Escherichia coli CVM N33574PS | 918 | 1203 |
| Comamonas sp. 26 | 919 | 1204 |
| Nitrosovibrio sp. Nv12 | 872 | 1159 |
| Escherichia coli sv. 104 FHI19 | 920 | 1205 |
| Klebsiella pneumoniae 143500500 | 796 | 1085 |
| Klebsiella pneumoniae 143500532 | 796 | 1085 |
| Klebsiella pneumoniae 143500506 | 796 | 1085 |
| Klebsiella pneumoniae 143500534 | 796 | 1085 |
| Klebsiella pneumoniae 143500531 | 796 | 1085 |
| Klebsiella pneumoniae 143500505 | 796 | 1085 |
| Klebsiella pneumoniae 143500529 | 796 | 1085 |
| Klebsiella pneumoniae 143500510 | 796 | 1085 |
| Klebsiella pneumoniae 143500512 | 796 | 1085 |
| Klebsiella pneumoniae 143500519 | 796 | 1085 |
| Klebsiella pneumoniae 143500528 | 796 | 1085 |
| Klebsiella pneumoniae 143500525 | 796 | 1085 |
| Klebsiella pneumoniae 143500514 | 796 | 1085 |
| Klebsiella pneumoniae 143500517 | 796 | 1085 |
| Klebsiella pneumoniae 143500509 | 796 | 1085 |
| Klebsiella pneumoniae 143500537 | 796 | 1085 |
| Klebsiella pneumoniae 143500535 | 796 | 1085 |
| Klebsiella pneumoniae 143500536 | 796 | 1085 |
| Klebsiella pneumoniae 143500540 | 796 | 1085 |
| Klebsiella pneumoniae 143500541 | 796 | 1085 |
| Klebsiella pneumoniae 143500538 | 796 | 1085 |
| Klebsiella pneumoniae 143500545 | 796 | 1085 |
| Klebsiella pneumoniae 143500543 | 796 | 1085 |
| Klebsiella pneumoniae 143500542 | 796 | 1085 |
| Klebsiella pneumoniae 143500546 | 796 | 1085 |
| Klebsiella pneumoniae 143500549 | 796 | 1085 |
| Klebsiella pneumoniae 143500551 | 796 | 1085 |
| Klebsiella pneumoniae 143500550 | 796 | 1085 |
| Klebsiella pneumoniae 143500548 | 796 | 1085 |
| Klebsiella pneumoniae 143500523 | 796 | 1085 |
| Klebsiella pneumoniae 143500554 | 796 | 1085 |
| Klebsiella pneumoniae 143500555 | 796 | 1085 |
| Klebsiella pneumoniae 143500552 | 796 | 1085 |
| Klebsiella pneumoniae ST258 | 796 | 1085 |
| Klebsiella pneumoniae OC648 | 796 | 1085 |
| Methylorubrum populi CD11_7 | 921 | 1206 |
| Escherichia coli APEC O2 | 922 | 1094 |
| Lactiplantibacillus plantarum Nizo2262 | 923 | 1207 |
| Lactiplantibacillus plantarum Nizo2776 | 924 | 1208 |
| Lactiplantibacillus plantarum Nizo2855 | 846 | 1134 |
| Lactiplantibacillus plantarum Nizo3894 | 923 | 1207 |
| Lactiplantibacillus plantarum ER | 923 | 1207 |
| Lactiplantibacillus plantarum 19.1 | 828 | 1117 |
| Moraxella catarrhalis CCUG 353 | 925 | 1209 |
| Tenacibaculum dicentrarchi AY7486TD | 926 | 1210 |
| Tenacibaculum dicentrarchi AY7486TD | 926 | 1210 |
| Cellvibrionaceae bacterium 017 | 927 | 1211 |
| Morganella psychrotolerans DI-20 | 928 | 1212 |
| Burkholderia territorii RF23-BP82 | 929 | 1213 |
| Sediminispirochaeta smaragdinae DSM 11293 | 930 | 1214 |
| Sediminispirochaeta smaragdinae DSM 11293 | 931 | 1215 |

TABLE 12
TAD2 MGV homologs

| | | | | | | | | | | AA | NA |
|---|---|---|---|---|---|---|---|---|---|---|---|
| | | | | | | | | | | sequence | sequence |
| | | | | | | | | | | SEQ | SEQ |
| ictv_order | ictv_family | ictv_genus | host_domain | host_phylum | host_class | host_order | host_family | host_genus | host_species | ID NO | ID NO |
| Caudovirales | Siphoviridae | | Bacteria | Proteobacteria | Gammaproteobacteria | Enterobacterales | Enterobacteriaceae | Escherichia | GUT_GENOME144544 | 1216 | 805 |
| Caudovirales | Podoviridae | Lederbergvirus | Bacteria | Proteobacteria | Gammaproteobacteria | Enterobacterales | Enterobacteriaceae | Escherichia | GUT_GENOME144544 | 1217 | 932 |
| Caudovirales | Podoviridae | Lederbergvirus | Bacteria | Proteobacteria | Gammaproteobacteria | Enterobacterales | Enterobacteriaceae | Escherichia | GUT_GENOME144544 | 1217 | 932 |
| Caudovirales | Podoviridae | Lederbergvirus | Bacteria | Proteobacteria | Gammaproteobacteria | Enterobacterales | Enterobacteriaceae | Escherichia | GUT_GENOME144544 | 1218 | 933 |
| Caudovirales | | Triavirus | Bacteria | Firmicutes_A | Clostridia | Oscillospirales | Ruminococcaceae | Ruminococcus_C | | 1219 | 934 |
| Caudovirales | | | Bacteria | Bacteroidota | Bacteroidia | Bacteroidales | Bacteroidaceae | | | 1220 | 935 |
| Caudovirales | Podoviridae | Lederbergvirus | Bacteria | Proteobacteria | Gammaproteobacteria | Enterobacterales | Enterobacteriaceae | Escherichia | GUT_GENOME144544 | 1216 | 805 |
| Caudovirales | Podoviridae | Lederbergvirus | Bacteria | Proteobacteria | Gammaproteobacteria | Enterobacterales | Enterobacteriaceae | Escherichia | GUT_GENOME144544 | 1221 | 936 |
| Caudovirales | Podoviridae | Lederbergvirus | Bacteria | Proteobacteria | Gammaproteobacteria | Enterobacterales | Enterobacteriaceae | Escherichia | GUT_GENOME144544 | 1222 | 937 |
| Caudovirales | Podoviridae | Lederbergvirus | Bacteria | Proteobacteria | Gammaproteobacteria | Enterobacterales | Enterobacteriaceae | Escherichia | GUT_GENOME144544 | 1218 | 933 |
| Caudovirales | | Uetakevirus | Bacteria | Proteobacteria | Gammaproteobacteria | Enterobacterales | Enterobacteriaceae | Klebsiella_A | | 1223 | 938 |
| Caudovirales | Siphoviridae | | Bacteria | Bacteroidota | Bacteroidia | Bacteroidales | Bacteroidaceae | | | 1224 | 939 |
| Caudovirales | | | Bacteria | Firmicutes_A | Clostridia | Lachnospirales | Lachnospiraceae | | | 1225 | 940 |
| Caudovirales | Myoviridae | | Bacteria | | | | | | | 1226 | 941 |
| Caudovirales | Siphoviridae | | Bacteria | Firmicutes_A | Clostridia | Lachnospirales | Lachnospiraceae | Dorea | GUT_GENOME000149 | 1227 | 942 |
| Caudovirales | Podoviridae | Lederbergvirus | Bacteria | Proteobacteria | Gammaproteobacteria | Enterobacterales | Enterobacteriaceae | Escherichia | GUT_GENOME144544 | 1228 | 943 |
| Caudovirales | crAss-phage | | Bacteria | Bacteroidota | Bacteroidia | Bacteroidales | Bacteroidaceae | | | 1229 | 944 |
| Caudovirales | | | Bacteria | Bacteroidota | Bacteroidia | Bacteroidales | Tannerellaceae | Parabacteroides | GUT_GENOME143131 | 1230 | 945 |
| Caudovirales | | | Bacteria | Firmicutes_A | Clostridia | Lachnospirales | Lachnospiraceae | | | 1231 | 946 |
| Caudovirales | | | Bacteria | Proteobacteria | Gammaproteobacteria | Enterobacterales | Enterobacteriaceae | Escherichia | GUT_GENOME144544 | 1216 | 947 |
| Caudovirales | | Triavirus | Bacteria | Firmicutes_A | Clostridia | Oscillospirales | Ruminococcaceae | Ruminococcus_C | | 1232 | 948 |
| Caudovirales | | | Bacteria | Bacteroidota | Bacteroidia | Bacteroidales | Tannerellaceae | Parabacteroides | GUT_GENOME143131 | 1233 | 949 |
| Caudovirales | | | Bacteria | Firmicutes_A | Clostridia | Lachnospirales | Lachnospiraceae | Dorea | GUT_GENOME000149 | 1234 | 950 |
| Caudovirales | | | Bacteria | Bacteroidota | Bacteroidia | Bacteroidales | Tannerellaceae | Parabacteroides | GUT_GENOME143131 | 1233 | 949 |
| Caudovirales | Podoviridae | Lederbergvirus | Bacteria | Proteobacteria | Gammaproteobacteria | Enterobacterales | Enterobacteriaceae | Escherichia | GUT_GENOME144544 | 1235 | 951 |
| Caudovirales | Siphoviridae | | Bacteria | Bacteroidota | Bacteroidia | Bacteroidales | Muribaculaceae | UBA7173 | GUT_GENOME007566 | 1236 | 952 |
| Caudovirales | | | Bacteria | Bacteroidota | Bacteroidia | Bacteroidales | Tannerellaceae | Parabacteroides | GUT_GENOME143131 | 1237 | 953 |
| Caudovirales | crAss-phage | | Bacteria | Bacteroidota | Bacteroidia | Bacteroidales | Tannerellaceae | Parabacteroides | GUT_GENOME143131 | 1233 | 954 |
| Caudovirales | | | Bacteria | Bacteroidota | Bacteroidia | Bacteroidales | Tannerellaceae | Parabacteroides | GUT_GENOME143131 | 1233 | 949 |
| Caudovirales | | | Bacteria | Proteobacteria | Gammaproteobacteria | Enterobacterales | Enterobacteriaceae | Escherichia | GUT_GENOME144544 | 1216 | 805 |
| Caudovirales | Podoviridae | Lederbergvirus | Bacteria | Proteobacteria | Gammaproteobacteria | Enterobacterales | Enterobacteriaceae | Escherichia | GUT_GENOME144544 | 1221 | 936 |
| Caudovirales | Siphoviridae | | Bacteria | | | | | | | 1238 | 955 |
| Caudovirales | Siphoviridae | | Bacteria | Firmicutes | Bacilli | Haloplasmatales | Turicibacteraceae | Turicibacter | GUT_GENOME000677 | 1238 | 955 |
| Caudovirales | Podoviridae | Lederbergvirus | Bacteria | Proteobacteria | Gammaproteobacteria | Enterobacterales | Enterobacteriaceae | Escherichia | GUT_GENOME144544 | 1222 | 937 |
| Caudovirales | Siphoviridae | | Bacteria | Firmicutes_A | Clostridia | Lachnospirales | Lachnospiraceae | | | 1239 | 956 |
| Caudovirales | Siphoviridae | | Bacteria | Firmicutes_A | Clostridia | Lachnospirales | Lachnospiraceae | | | 1239 | 956 |
| Caudovirales | | | Bacteria | Bacteroidota | Bacteroidia | Bacteroidales | Tannerellaceae | Parabacteroides | GUT_GENOME143131 | 1233 | 954 |
| Caudovirales | | | Bacteria | Bacteroidota | Bacteroidia | Bacteroidales | Tannerellaceae | Parabacteroides | GUT_GENOME143131 | 1237 | 953 |
| Caudovirales | | | Bacteria | Bacteroidota | Bacteroidia | Bacteroidales | Tannerellaceae | Parabacteroides | GUT_GENOME143131 | 1233 | 949 |
| Caudovirales | | | Bacteria | Bacteroidota | Bacteroidia | Bacteroidales | Bacteroidaceae | | | 1229 | 944 |
| Caudovirales | | | Bacteria | Firmicutes_A | Clostridia | Lachnospirales | Lachnospiraceae | Clostridium_M | | 1240 | 957 |
| Caudovirales | | | Bacteria | Firmicutes_A | Clostridia | Lachnospirales | Lachnospiraceae | | | 1241 | 958 |
| Caudovirales | | | Bacteria | Proteobacteria | Gammaproteobacteria | Enterobacterales | Enterobacteriaceae | Escherichia | GUT_GENOME144544 | 1242 | 761 |
| Caudovirales | | | Bacteria | Firmicutes_A | Clostridia | Lachnospirales | Lachnospiraceae | | | 1243 | 959 |
| Caudovirales | | | Bacteria | Firmicutes_A | Clostridia | Lachnospirales | Lachnospiraceae | | | 1243 | 959 |
| Caudovirales | Siphoviridae | | Bacteria | Proteobacteria | Gammaproteobacteria | Enterobacterales | Enterobacteriaceae | Klebsiella | GUT_GENOME147598 | 1244 | 960 |
| Caudovirales | Siphoviridae | | Bacteria | Bacteroidota | Bacteroidia | Bacteroidales | Bacteroidaceae | Bacteroides | | 1224 | 939 |
| Caudovirales | Siphoviridae | | Bacteria | Bacteroidota | Bacteroidia | Bacteroidales | Tannerellaceae | Parabacteroides | GUT_GENOME143131 | 1233 | 954 |
| Caudovirales | | | Bacteria | Bacteroidota | Bacteroidia | Bacteroidales | Tannerellaceae | Parabacteroides | GUT_GENOME143131 | 1233 | 954 |
| Caudovirales | | | Bacteria | Firmicutes_A | Clostridia | Lachnospirales | Lachnospiraceae | Dorea | GUT_GENOME000149 | 1227 | 942 |
| Caudovirales | | | Bacteria | Firmicutes_A | Clostridia | Lachnospirales | Lachnospiraceae | Dorea | GUT_GENOME000149 | 1227 | 942 |
| Caudovirales | | | Bacteria | Bacteroidota | Bacteroidia | Bacteroidales | Tannerellaceae | Parabacteroides | GUT_GENOME143131 | 1233 | 954 |
| Caudovirales | | | Bacteria | Bacteroidota | Bacteroidia | Bacteroidales | Tannerellaceae | Parabacteroides | GUT_GENOME143131 | 1233 | 954 |
| Caudovirales | | | Bacteria | Bacteroidota | Bacteroidia | Bacteroidales | Tannerellaceae | Parabacteroides | GUT_GENOME143131 | 1233 | 954 |
| Caudovirales | | | Bacteria | Firmicutes_A | Clostridia | Lachnospirales | Lachnospiraceae | Dorea | GUT_GENOME000149 | 1245 | 961 |
| Caudovirales | | | Bacteria | Firmicutes_A | Clostridia | Lachnospirales | Lachnospiraceae | Dorea | GUT_GENOME000149 | 1246 | 962 |
| Caudovirales | | | Bacteria | Firmicutes_A | Clostridia | Lachnospirales | Lachnospiraceae | | | 1247 | 963 |
| Caudovirales | | | Bacteria | Bacteroidota | Bacteroidia | Bacteroidales | Tannerellaceae | Parabacteroides | GUT_GENOME143131 | 1233 | 954 |
| Caudovirales | | | Bacteria | Firmicutes_A | Clostridia | Lachnospirales | Lachnospiraceae | | | 1241 | 958 |
| Caudovirales | | | Bacteria | Bacteroidota | Bacteroidia | Bacteroidales | Tannerellaceae | Parabacteroides | GUT_GENOME143131 | 1233 | 954 |
| Caudovirales | | | Bacteria | Bacteroidota | Bacteroidia | Bacteroidales | Tannerellaceae | Parabacteroides | GUT_GENOME143131 | 1248 | 964 |
| Caudovirales | | | Bacteria | Bacteroidota | Bacteroidia | Bacteroidales | Bacteroidaceae | | | 1229 | 944 |
| Caudovirales | | | Bacteria | Bacteroidota | Bacteroidia | Bacteroidales | Bacteroidaceae | | | 1229 | 944 |
| Caudovirales | Siphoviridae | | Bacteria | Firmicutes_A | Clostridia | Lachnospirales | Lachnospiraceae | Dorea | GUT_GENOME000149 | 1249 | 965 |
| Caudovirales | | | Bacteria | Firmicutes_A | Clostridia | Lachnospirales | Lachnospiraceae | Dorea | GUT_GENOME000149 | 1234 | 950 |
| Caudovirales | | | Bacteria | Firmicutes_A | Clostridia | Lachnospirales | Lachnospiraceae | Dorea | GUT_GENOME000149 | 1234 | 950 |
| Caudovirales | Siphoviridae | | Bacteria | Firmicutes_A | Clostridia | Clostridiales | Clostridiaceae | Clostridium | GUT_GENOME036763 | 1250 | 966 |
| Caudovirales | Siphoviridae | | Bacteria | Firmicutes_A | Clostridia | Clostridiales | Clostridiaceae | Clostridium | GUT_GENOME036763 | 1250 | 966 |
| Caudovirales | | | Bacteria | Firmicutes_A | Clostridia | Lachnospirales | Lachnospiraceae | Dorea | GUT_GENOME000149 | 1227 | 942 |
| Caudovirales | | | Bacteria | Firmicutes_A | Clostridia | Lachnospirales | Lachnospiraceae | Dorea | GUT_GENOME000149 | 1227 | 942 |
| Caudovirales | | | Bacteria | Bacteroidota | Bacteroidia | Bacteroidales | Tannerellaceae | Parabacteroides | GUT_GENOME143131 | 1237 | 953 |
| Caudovirales | crAss-phage | | Bacteria | Bacteroidota | Bacteroidia | Bacteroidales | Tannerellaceae | Parabacteroides | GUT_GENOME143131 | 1233 | 954 |
| Caudovirales | crAss-phage | | Bacteria | Bacteroidota | Bacteroidia | Bacteroidales | Tannerellaceae | Parabacteroides | GUT_GENOME143131 | 1233 | 954 |
| Caudovirales | | | Bacteria | Bacteroidota | Bacteroidia | Bacteroidales | Tannerellaceae | Parabacteroides | GUT_GENOME143131 | 1237 | 953 |
| Caudovirales | | | Bacteria | Bacteroidota | Bacteroidia | Bacteroidales | Tannerellaceae | Parabacteroides | GUT_GENOME143131 | 1237 | 953 |
| Caudovirales | | | Bacteria | Bacteroidota | Bacteroidia | Bacteroidales | Tannerellaceae | Parabacteroides | GUT_GENOME143131 | 1233 | 954 |
| Caudovirales | | | | | | | | | | 1251 | 967 |
| Caudovirales | | | Bacteria | Bacteroidota | Bacteroidia | Bacteroidales | Tannerellaceae | Parabacteroides | GUT_GENOME143131 | 1233 | 949 |
| Caudovirales | | | Bacteria | Bacteroidota | Bacteroidia | Bacteroidales | Bacteroidaceae | Prevotella | GUT_GENOME140299 | 1252 | 968 |
| Caudovirales | | | Bacteria | Bacteroidota | Bacteroidia | Bacteroidales | Bacteroidaceae | Bacteroides | GUT_GENOME147854 | 1229 | 969 |
| Caudovirales | | | Bacteria | Bacteroidota | Bacteroidia | Bacteroidales | Tannerellaceae | Parabacteroides | GUT_GENOME143131 | 1233 | 954 |
| Caudovirales | | | Bacteria | Bacteroidota | Bacteroidia | Bacteroidales | Tannerellaceae | Parabacteroides | GUT_GENOME000192 | 1253 | 970 |
| Caudovirales | | | Bacteria | Bacteroidota | Bacteroidia | Bacteroidales | Tannerellaceae | Parabacteroides | GUT_GENOME000192 | 1253 | 970 |
| Caudovirales | | | Bacteria | Bacteroidota | Bacteroidia | Bacteroidales | Tannerellaceae | Parabacteroides | GUT_GENOME000192 | 1254 | 971 |
| Caudovirales | | | Bacteria | Bacteroidota | Bacteroidia | Bacteroidales | Tannerellaceae | Parabacteroides | GUT_GENOME000192 | 1255 | 972 |
| Caudovirales | | | Bacteria | Bacteroidota | Bacteroidia | Bacteroidales | Tannerellaceae | Parabacteroides | GUT_GENOME000192 | 1256 | 973 |
| Caudovirales | | | Bacteria | Bacteroidota | Bacteroidia | Bacteroidales | Tannerellaceae | Parabacteroides | GUT_GENOME000192 | 1257 | 974 |
| Caudovirales | | | Bacteria | Bacteroidota | Bacteroidia | Bacteroidales | Tannerellaceae | Parabacteroides | GUT_GENOME000192 | 1258 | 975 |
| Caudovirales | | | Bacteria | Bacteroidota | Bacteroidia | Bacteroidales | Tannerellaceae | Parabacteroides | GUT_GENOME000192 | 1257 | 976 |
| Caudovirales | | | Bacteria | Bacteroidota | Bacteroidia | Bacteroidales | Tannerellaceae | Parabacteroides | GUT_GENOME000192 | 1258 | 975 |
| Caudovirales | | | Bacteria | Bacteroidota | Bacteroidia | Bacteroidales | Tannerellaceae | Parabacteroides | GUT_GENOME000192 | 1255 | 972 |
| Caudovirales | | | Bacteria | Bacteroidota | Bacteroidia | Bacteroidales | Tannerellaceae | Parabacteroides | GUT_GENOME000192 | 1254 | 971 |
| Caudovirales | | | Bacteria | Bacteroidota | Bacteroidia | Bacteroidales | Tannerellaceae | Parabacteroides | GUT_GENOME000192 | 1255 | 972 |
| Caudovirales | | | Bacteria | Bacteroidota | Bacteroidia | Bacteroidales | Tannerellaceae | Parabacteroides | GUT_GENOME000192 | 1255 | 972 |
| Caudovirales | | | Bacteria | Bacteroidota | Bacteroidia | Bacteroidales | Tannerellaceae | Parabacteroides | GUT_GENOME000192 | 1255 | 977 |
| Caudovirales | | | Bacteria | Bacteroidota | Bacteroidia | Bacteroidales | Tannerellaceae | Parabacteroides | GUT_GENOME000192 | 1258 | 975 |
| Caudovirales | | | Bacteria | Bacteroidota | Bacteroidia | Bacteroidales | Tannerellaceae | Parabacteroides | GUT_GENOME000192 | 1259 | 978 |
| Caudovirales | | | Bacteria | Bacteroidota | Bacteroidia | Bacteroidales | Tannerellaceae | Parabacteroides | GUT_GENOME000192 | 1260 | 979 |
| Caudovirales | | | Bacteria | Bacteroidota | Bacteroidia | Bacteroidales | Tannerellaceae | Parabacteroides | GUT_GENOME000192 | 1255 | 980 |
| Caudovirales | | | Bacteria | Bacteroidota | Bacteroidia | Bacteroidales | Tannerellaceae | Parabacteroides | | 1261 | 981 |
| Caudovirales | | | Bacteria | Bacteroidota | Bacteroidia | Bacteroidales | Tannerellaceae | Parabacteroides | GUT_GENOME000192 | 1262 | 982 |
| Caudovirales | | | Bacteria | Bacteroidota | Bacteroidia | Bacteroidales | Tannerellaceae | Parabacteroides | GUT_GENOME000192 | 1263 | 983 |
| Caudovirales | | | Bacteria | Bacteroidota | Bacteroidia | Bacteroidales | Tannerellaceae | Parabacteroides | GUT_GENOME000192 | 1264 | 984 |
| Caudovirales | | | Bacteria | Bacteroidota | Bacteroidia | Bacteroidales | Tannerellaceae | Parabacteroides | GUT_GENOME000192 | 1265 | 985 |
| Caudovirales | | | Bacteria | Bacteroidota | Bacteroidia | Bacteroidales | Tannerellaceae | Parabacteroides | GUT_GENOME000192 | 1263 | 983 |
| Caudovirales | | | Bacteria | Bacteroidota | Bacteroidia | Bacteroidales | Tannerellaceae | Parabacteroides | GUT_GENOME000192 | 1258 | 975 |
| Caudovirales | | | Bacteria | Bacteroidota | Bacteroidia | Bacteroidales | Tannerellaceae | Parabacteroides | GUT_GENOME000192 | 1265 | 986 |
| Caudovirales | | | Bacteria | Bacteroidota | Bacteroidia | Bacteroidales | Tannerellaceae | Parabacteroides | GUT_GENOME000192 | 1265 | 986 |
| Caudovirales | | | Bacteria | Bacteroidota | Bacteroidia | Bacteroidales | Tannerellaceae | Parabacteroides | GUT_GENOME000192 | 1265 | 985 |
| Caudovirales | | | Bacteria | Bacteroidota | Bacteroidia | Bacteroidales | Tannerellaceae | Parabacteroides | GUT_GENOME000192 | 1264 | 984 |
| Caudovirales | | | Bacteria | Bacteroidota | Bacteroidia | Bacteroidales | Tannerellaceae | Parabacteroides | GUT_GENOME000192 | 1255 | 980 |
| Caudovirales | | | Bacteria | Bacteroidota | Bacteroidia | Bacteroidales | Tannerellaceae | Parabacteroides | GUT_GENOME000192 | 1263 | 983 |
| Caudovirales | | | Bacteria | Bacteroidota | Bacteroidia | Bacteroidales | Tannerellaceae | Parabacteroides | GUT_GENOME000192 | 1266 | 987 |
| Caudovirales | | | Bacteria | Bacteroidota | Bacteroidia | Bacteroidales | Tannerellaceae | Parabacteroides | GUT_GENOME000192 | 1267 | 988 |
| Caudovirales | | | Bacteria | Bacteroidota | Bacteroidia | Bacteroidales | Tannerellaceae | Parabacteroides | GUT_GENOME000192 | 1255 | 989 |
| Caudovirales | | | Bacteria | Bacteroidota | Bacteroidia | Bacteroidales | Tannerellaceae | Parabacteroides | GUT_GENOME000192 | 1258 | 975 |
| Caudovirales | | | Bacteria | Bacteroidota | Bacteroidia | Bacteroidales | Tannerellaceae | Parabacteroides | GUT_GENOME000192 | 1255 | 972 |
| Caudovirales | | | Bacteria | Bacteroidota | Bacteroidia | Bacteroidales | Tannerellaceae | Parabacteroides | GUT_GENOME000192 | 1258 | 975 |
| Caudovirales | | | Bacteria | Bacteroidota | Bacteroidia | Bacteroidales | Tannerellaceae | Parabacteroides | GUT_GENOME000192 | 1255 | 990 |
| Caudovirales | | | Bacteria | Bacteroidota | Bacteroidia | Bacteroidales | Tannerellaceae | Parabacteroides | GUT_GENOME000192 | 1255 | 972 |
| Caudovirales | | | Bacteria | Bacteroidota | Bacteroidia | Bacteroidales | Tannerellaceae | Parabacteroides | GUT_GENOME000192 | 1268 | 991 |
| Caudovirales | | | Bacteria | Bacteroidota | Bacteroidia | Bacteroidales | Tannerellaceae | Parabacteroides | GUT_GENOME000192 | 1255 | 972 |
| Caudovirales | | | Bacteria | Bacteroidota | Bacteroidia | Bacteroidales | Tannerellaceae | Parabacteroides | GUT_GENOME000192 | 1255 | 992 |
| Caudovirales | | | Bacteria | Bacteroidota | Bacteroidia | Bacteroidales | Tannerellaceae | Parabacteroides | GUT_GENOME000192 | 1255 | 980 |
| Caudovirales | | | Bacteria | Bacteroidota | Bacteroidia | Bacteroidales | Tannerellaceae | Parabacteroides | GUT_GENOME000192 | 1255 | 993 |
| Caudovirales | | | Bacteria | Bacteroidota | Bacteroidia | Bacteroidales | Tannerellaceae | Parabacteroides | GUT_GENOME000192 | 1255 | 980 |
| Caudovirales | | | Bacteria | Bacteroidota | Bacteroidia | Bacteroidales | Tannerellaceae | Parabacteroides | GUT_GENOME000192 | 1269 | 994 |
| Caudovirales | | | Bacteria | Bacteroidota | Bacteroidia | Bacteroidales | | | | 1258 | 975 |
| Caudovirales | | | Bacteria | Bacteroidota | Bacteroidia | Bacteroidales | Tannerellaceae | Parabacteroides | GUT_GENOME000192 | 1255 | 972 |
| Caudovirales | | | Bacteria | Bacteroidota | Bacteroidia | Bacteroidales | Tannerellaceae | Parabacteroides | GUT_GENOME000192 | 1265 | 995 |
| Caudovirales | | | Bacteria | Bacteroidota | Bacteroidia | Bacteroidales | Tannerellaceae | Parabacteroides | GUT_GENOME000192 | 1263 | 983 |
| Caudovirales | | | Bacteria | Bacteroidota | Bacteroidia | Bacteroidales | Tannerellaceae | Parabacteroides | GUT_GENOME000192 | 1255 | 972 |
| Caudovirales | | | Bacteria | Bacteroidota | Bacteroidia | Bacteroidales | Tannerellaceae | Parabacteroides | GUT_GENOME000192 | 1255 | 972 |
| Caudovirales | | | Bacteria | Bacteroidota | Bacteroidia | Bacteroidales | Tannerellaceae | Parabacteroides | GUT_GENOME000192 | 1263 | 983 |
| Caudovirales | | | Bacteria | Bacteroidota | Bacteroidia | Bacteroidales | Tannerellaceae | Parabacteroides | GUT_GENOME000192 | 1258 | 975 |
| Caudovirales | | | Bacteria | Bacteroidota | Bacteroidia | Bacteroidales | Tannerellaceae | Parabacteroides | GUT_GENOME000192 | 1258 | 975 |
| Caudovirales | | | Bacteria | Bacteroidota | Bacteroidia | Bacteroidales | Tannerellaceae | Parabacteroides | GUT_GENOME000192 | 1270 | 996 |
| Caudovirales | | | Bacteria | Bacteroidota | Bacteroidia | Bacteroidales | Tannerellaceae | Parabacteroides | GUT_GENOME000192 | 1255 | 972 |
| Caudovirales | | | Bacteria | Bacteroidota | Bacteroidia | Bacteroidales | Tannerellaceae | Parabacteroides | GUT_GENOME000192 | 1258 | 975 |
| Caudovirales | | | Bacteria | Bacteroidota | Bacteroidia | Bacteroidales | Tannerellaceae | Parabacteroides | GUT_GENOME000192 | 1265 | 985 |
| Caudovirales | | | Bacteria | Bacteroidota | Bacteroidia | Bacteroidales | Tannerellaceae | Parabacteroides | GUT_GENOME000192 | 1262 | 997 |
| Caudovirales | | | Bacteria | Bacteroidota | Bacteroidia | Bacteroidales | Tannerellaceae | Parabacteroides | GUT_GENOME000192 | 1271 | 998 |
| Caudovirales | | | Bacteria | Bacteroidota | Bacteroidia | Bacteroidales | Tannerellaceae | Parabacteroides | GUT_GENOME000192 | 1263 | 983 |
| Caudovirales | | | Bacteria | Bacteroidota | Bacteroidia | Bacteroidales | Tannerellaceae | Parabacteroides | GUT_GENOME000192 | 1255 | 999 |
| Caudovirales | | | Bacteria | Bacteroidota | Bacteroidia | Bacteroidales | Tannerellaceae | Parabacteroides | GUT_GENOME000192 | 1272 | 1000 |
| Caudovirales | | | Bacteria | Bacteroidota | Bacteroidia | Bacteroidales | Tannerellaceae | Parabacteroides | GUT_GENOME000192 | 1258 | 975 |
| Caudovirales | | | Bacteria | Bacteroidota | Bacteroidia | Bacteroidales | Tannerellaceae | Parabacteroides | GUT_GENOME000192 | 1273 | 1001 |
| Caudovirales | | | Bacteria | Bacteroidota | Bacteroidia | Bacteroidales | Tannerellaceae | Parabacteroides | GUT_GENOME000192 | 1271 | 998 |
| Caudovirales | crAss-phage | | Bacteria | Bacteroidota | Bacteroidia | Bacteroidales | Tannerellaceae | Parabacteroides | GUT_GENOME000192 | 1258 | 1002 |
| Caudovirales | | | Bacteria | Bacteroidota | Bacteroidia | Bacteroidales | Tannerellaceae | Parabacteroides | GUT_GENOME000192 | 1271 | 998 |
| Caudovirales | | | Bacteria | Bacteroidota | Bacteroidia | Bacteroidales | Tannerellaceae | Parabacteroides | GUT_GENOME000192 | 1255 | 1003 |
| Caudovirales | | | Bacteria | Bacteroidota | Bacteroidia | Bacteroidales | Tannerellaceae | Parabacteroides | GUT_GENOME000192 | 1260 | 979 |
| Caudovirales | | | Bacteria | Bacteroidota | Bacteroidia | Bacteroidales | Tannerellaceae | Parabacteroides | | 1258 | 975 |
| Caudovirales | | | Bacteria | Bacteroidota | Bacteroidia | Bacteroidales | Tannerellaceae | Parabacteroides | GUT_GENOME000192 | 1255 | 972 |
| Caudovirales | | | Bacteria | Bacteroidota | Bacteroidia | Bacteroidales | Tannerellaceae | Parabacteroides | GUT_GENOME000192 | 1260 | 979 |
| Caudovirales | | | Bacteria | Bacteroidota | Bacteroidia | Bacteroidales | Tannerellaceae | Parabacteroides | GUT_GENOME000192 | 1274 | 1004 |
| Caudovirales | | | Bacteria | Bacteroidota | Bacteroidia | Bacteroidales | Tannerellaceae | Parabacteroides | GUT_GENOME000192 | 1259 | 1005 |
| Caudovirales | | | Bacteria | Bacteroidota | Bacteroidia | Bacteroidales | Tannerellaceae | Parabacteroides | GUT_GENOME000192 | 1275 | 1006 |
| Caudovirales | | | Bacteria | Bacteroidota | Bacteroidia | Bacteroidales | Tannerellaceae | Parabacteroides | GUT_GENOME000192 | 1264 | 1007 |
| Caudovirales | | | Bacteria | Bacteroidota | Bacteroidia | Bacteroidales | Tannerellaceae | Parabacteroides | GUT_GENOME000192 | 1255 | 980 |
| Caudovirales | | | Bacteria | Bacteroidota | Bacteroidia | Bacteroidales | Tannerellaceae | Parabacteroides | GUT_GENOME000192 | 1255 | 977 |
| Caudovirales | | | Bacteria | Bacteroidota | Bacteroidia | Bacteroidales | Tannerellaceae | Parabacteroides | | 1259 | 1008 |
| Caudovirales | | | Bacteria | Bacteroidota | Bacteroidia | Bacteroidales | Tannerellaceae | Parabacteroides | GUT_GENOME000192 | 1265 | 985 |
| Caudovirales | | | Bacteria | Bacteroidota | Bacteroidia | Bacteroidales | Tannerellaceae | Parabacteroides | GUT_GENOME000192 | 1276 | 1009 |
| Caudovirales | | | Bacteria | Bacteroidota | Bacteroidia | Bacteroidales | Tannerellaceae | Parabacteroides | GUT_GENOME000192 | 1258 | 975 |
| Caudovirales | | | Bacteria | Bacteroidota | Bacteroidia | Bacteroidales | Tannerellaceae | Parabacteroides | GUT_GENOME000192 | 1263 | 1010 |
| Caudovirales | | | Bacteria | Bacteroidota | Bacteroidia | Bacteroidales | Tannerellaceae | Parabacteroides | GUT_GENOME000192 | 1254 | 971 |
| Caudovirales | | | Bacteria | Bacteroidota | Bacteroidia | Bacteroidales | Tannerellaceae | Parabacteroides | GUT_GENOME000192 | 1255 | 1011 |
| Caudovirales | | | Bacteria | Bacteroidota | Bacteroidia | Bacteroidales | | | | 1262 | 1012 |
| Caudovirales | | | Bacteria | Bacteroidota | Bacteroidia | Bacteroidales | Tannerellaceae | Parabacteroides | GUT_GENOME000192 | 1277 | 1013 |
| Caudovirales | | | Bacteria | Bacteroidota | Bacteroidia | Bacteroidales | Tannerellaceae | Parabacteroides | GUT_GENOME000192 | 1277 | 1013 |
| Caudovirales | | | Bacteria | Bacteroidota | Bacteroidia | Bacteroidales | Tannerellaceae | Parabacteroides | GUT_GENOME000192 | 1259 | 1014 |
| Caudovirales | | | Bacteria | Bacteroidota | Bacteroidia | Bacteroidales | Tannerellaceae | Parabacteroides | GUT_GENOME000192 | 1263 | 983 |
| Caudovirales | | | Bacteria | Bacteroidota | Bacteroidia | Bacteroidales | Tannerellaceae | Parabacteroides | GUT_GENOME000192 | 1278 | 1015 |
| Caudovirales | | | Bacteria | Bacteroidota | Bacteroidia | Bacteroidales | Tannerellaceae | Parabacteroides | GUT_GENOME000192 | 1279 | 1016 |
| Caudovirales | | | Bacteria | Bacteroidota | Bacteroidia | Bacteroidales | Tannerellaceae | Parabacteroides | GUT_GENOME000192 | 1258 | 1017 |
| Caudovirales | | | Bacteria | Bacteroidota | Bacteroidia | Bacteroidales | Tannerellaceae | Parabacteroides | GUT_GENOME000192 | 1263 | 983 |
| Caudovirales | | | Bacteria | Bacteroidota | Bacteroidia | Bacteroidales | Tannerellaceae | Parabacteroides | GUT_GENOME000192 | 1258 | 975 |
| Caudovirales | | | Bacteria | Bacteroidota | Bacteroidia | Bacteroidales | Tannerellaceae | Parabacteroides | GUT_GENOME000192 | 1255 | 980 |
| Caudovirales | | | Bacteria | Bacteroidota | Bacteroidia | Bacteroidales | Tannerellaceae | Parabacteroides | GUT_GENOME000192 | 1255 | 1003 |
| Caudovirales | | | Bacteria | Bacteroidota | Bacteroidia | Bacteroidales | Tannerellaceae | Parabacteroides | GUT_GENOME000192 | 1265 | 985 |
| Caudovirales | | | Bacteria | Bacteroidota | Bacteroidia | Bacteroidales | Tannerellaceae | Parabacteroides | GUT_GENOME000192 | 1258 | 975 |
| Caudovirales | | | Bacteria | Bacteroidota | Bacteroidia | Bacteroidales | Tannerellaceae | Parabacteroides | GUT_GENOME000192 | 1263 | 1010 |
| Caudovirales | | | Bacteria | Bacteroidota | Bacteroidia | Bacteroidales | Tannerellaceae | Parabacteroides | GUT_GENOME000192 | 1280 | 1018 |
| Caudovirales | | | Bacteria | Bacteroidota | Bacteroidia | Bacteroidales | Tannerellaceae | Parabacteroides | GUT_GENOME000192 | 1255 | 980 |
| Caudovirales | | | Bacteria | Bacteroidota | Bacteroidia | Bacteroidales | Tannerellaceae | Parabacteroides | GUT_GENOME000192 | 1259 | 1005 |
| Caudovirales | | | Bacteria | Bacteroidota | Bacteroidia | Bacteroidales | Tannerellaceae | Parabacteroides | GUT_GENOME000192 | 1255 | 972 |
| Caudovirales | | | Bacteria | Bacteroidota | Bacteroidia | Bacteroidales | Tannerellaceae | Parabacteroides | GUT_GENOME000192 | 1255 | 972 |
| Caudovirales | | | Bacteria | Bacteroidota | Bacteroidia | Bacteroidales | Tannerellaceae | Parabacteroides | GUT_GENOME000192 | 1254 | 971 |
| Caudovirales | | | Bacteria | Bacteroidota | Bacteroidia | Bacteroidales | Tannerellaceae | Parabacteroides | GUT_GENOME000192 | 1255 | 1003 |
| Caudovirales | | | Bacteria | Bacteroidota | Bacteroidia | Bacteroidales | Tannerellaceae | Parabacteroides | GUT_GENOME000192 | 1265 | 985 |
| Caudovirales | | | Bacteria | Bacteroidota | Bacteroidia | Bacteroidales | Tannerellaceae | Parabacteroides | | 1255 | 989 |
| Caudovirales | | | Bacteria | Bacteroidota | Bacteroidia | Bacteroidales | Tannerellaceae | Parabacteroides | GUT_GENOME000192 | 1281 | 1019 |
| Caudovirales | | | Bacteria | Bacteroidota | Bacteroidia | Bacteroidales | Tannerellaceae | Parabacteroides | GUT_GENOME000192 | 1265 | 985 |
| Caudovirales | | | Bacteria | Bacteroidota | Bacteroidia | Bacteroidales | Tannerellaceae | Parabacteroides | GUT_GENOME000192 | 1265 | 985 |
| Caudovirales | | | Bacteria | Bacteroidota | Bacteroidia | Bacteroidales | Tannerellaceae | Parabacteroides | GUT_GENOME000192 | 1255 | 972 |
| Caudovirales | | | Bacteria | Bacteroidota | Bacteroidia | Bacteroidales | Tannerellaceae | Parabacteroides | GUT_GENOME000192 | 1262 | 997 |
| Caudovirales | | | Bacteria | Bacteroidota | Bacteroidia | Bacteroidales | Tannerellaceae | Parabacteroides | GUT_GENOME000192 | 1258 | 975 |
| Caudovirales | | | Bacteria | Bacteroidota | Bacteroidia | Bacteroidales | Tannerellaceae | Parabacteroides | GUT_GENOME000192 | 1262 | 997 |
| Caudovirales | | | Bacteria | Bacteroidota | Bacteroidia | Bacteroidales | Tannerellaceae | Parabacteroides | GUT_GENOME000192 | 1274 | 1004 |
| Caudovirales | | | Bacteria | Bacteroidota | Bacteroidia | Bacteroidales | Tannerellaceae | Parabacteroides | GUT_GENOME000192 | 1255 | 980 |
| Caudovirales | | | Bacteria | Bacteroidota | Bacteroidia | Bacteroidales | Tannerellaceae | Parabacteroides | GUT_GENOME000192 | 1262 | 997 |
| Caudovirales | | | Bacteria | Bacteroidota | Bacteroidia | Bacteroidales | Tannerellaceae | Parabacteroides | GUT_GENOME000192 | 1282 | 1020 |
| Caudovirales | | | Bacteria | Bacteroidota | Bacteroidia | Bacteroidales | Tannerellaceae | Parabacteroides | GUT_GENOME000192 | 1282 | 1020 |
| Caudovirales | | | Bacteria | Bacteroidota | Bacteroidia | Bacteroidales | Tannerellaceae | Parabacteroides | GUT_GENOME000192 | 1263 | 983 |
| Caudovirales | | | Bacteria | Bacteroidota | Bacteroidia | Bacteroidales | Tannerellaceae | Parabacteroides | GUT_GENOME000192 | 1283 | 1021 |
| Caudovirales | | | Bacteria | Bacteroidota | Bacteroidia | Bacteroidales | Tannerellaceae | Parabacteroides | GUT_GENOME000192 | 1284 | 1022 |
| Caudovirales | | | Bacteria | Bacteroidota | Bacteroidia | Bacteroidales | Tannerellaceae | Parabacteroides | GUT_GENOME000192 | 1255 | 980 |
| Caudovirales | | | Bacteria | Bacteroidota | Bacteroidia | Bacteroidales | Tannerellaceae | Parabacteroides | GUT_GENOME000192 | 1265 | 985 |
| Caudovirales | | | Bacteria | Bacteroidota | Bacteroidia | Bacteroidales | Tannerellaceae | Parabacteroides | GUT_GENOME000192 | 1265 | 985 |
| Caudovirales | | | Bacteria | Bacteroidota | Bacteroidia | Bacteroidales | Tannerellaceae | Parabacteroides | GUT_GENOME000192 | 1263 | 1010 |
| Caudovirales | | | Bacteria | Bacteroidota | Bacteroidia | Bacteroidales | Tannerellaceae | Parabacteroides | GUT_GENOME000192 | 1285 | 1023 |
| Caudovirales | | | Bacteria | Bacteroidota | Bacteroidia | Bacteroidales | Tannerellaceae | Parabacteroides | GUT_GENOME000192 | 1286 | 1024 |
| Caudovirales | | | Bacteria | Bacteroidota | Bacteroidia | Bacteroidales | Tannerellaceae | Parabacteroides | GUT_GENOME000192 | 1255 | 1025 |
| Caudovirales | | | Bacteria | Bacteroidota | Bacteroidia | Bacteroidales | Tannerellaceae | Parabacteroides | GUT_GENOME000192 | 1258 | 975 |
| Caudovirales | | | Bacteria | Bacteroidota | Bacteroidia | Bacteroidales | Tannerellaceae | Parabacteroides | GUT_GENOME000192 | 1255 | 972 |
| Caudovirales | | | Bacteria | Bacteroidota | Bacteroidia | Bacteroidales | Tannerellaceae | Parabacteroides | GUT_GENOME000192 | 1255 | 1003 |
| Caudovirales | | | Bacteria | Bacteroidota | Bacteroidia | Bacteroidales | Tannerellaceae | Parabacteroides | GUT_GENOME000192 | 1287 | 1026 |
| Caudovirales | | | Bacteria | Bacteroidota | Bacteroidia | Bacteroidales | Tannerellaceae | Parabacteroides | GUT_GENOME000192 | 1263 | 983 |
| Caudovirales | | | Bacteria | Bacteroidota | Bacteroidia | Bacteroidales | Tannerellaceae | Parabacteroides | GUT_GENOME000192 | 1258 | 975 |
| Caudovirales | | | Bacteria | Bacteroidota | Bacteroidia | Bacteroidales | Tannerellaceae | Parabacteroides | GUT_GENOME000192 | 1255 | 993 |
| Caudovirales | | | Bacteria | Bacteroidota | Bacteroidia | Bacteroidales | Tannerellaceae | Parabacteroides | GUT_GENOME000192 | 1263 | 983 |
| Caudovirales | | | Bacteria | Bacteroidota | Bacteroidia | Bacteroidales | Tannerellaceae | Parabacteroides | GUT_GENOME000192 | 1264 | 1027 |
| Caudovirales | | | Bacteria | Bacteroidota | Bacteroidia | Bacteroidales | Tannerellaceae | Parabacteroides | GUT_GENOME000192 | 1280 | 1018 |
| Caudovirales | | | Bacteria | Bacteroidota | Bacteroidia | Bacteroidales | Tannerellaceae | Parabacteroides | GUT_GENOME000192 | 1260 | 1028 |
| Caudovirales | | | Bacteria | Bacteroidota | Bacteroidia | Bacteroidales | Tannerellaceae | Parabacteroides | GUT_GENOME000192 | 1256 | 1029 |
| Caudovirales | | | Bacteria | Bacteroidota | Bacteroidia | Bacteroidales | Tannerellaceae | Parabacteroides | GUT_GENOME000192 | 1263 | 1030 |
| Caudovirales | | | Bacteria | Bacteroidota | Bacteroidia | Bacteroidales | Tannerellaceae | Parabacteroides | GUT_GENOME000192 | 1263 | 983 |
| Caudovirales | | | Bacteria | Bacteroidota | Bacteroidia | Bacteroidales | Tannerellaceae | Parabacteroides | | 1258 | 975 |
| Caudovirales | | | Bacteria | Bacteroidota | Bacteroidia | Bacteroidales | Tannerellaceae | Parabacteroides | GUT_GENOME000192 | 1263 | 983 |
| Caudovirales | | | Bacteria | Bacteroidota | Bacteroidia | Bacteroidales | Tannerellaceae | Parabacteroides | GUT_GENOME000192 | 1258 | 975 |
| Caudovirales | | | Bacteria | Bacteroidota | Bacteroidia | Bacteroidales | Tannerellaceae | Parabacteroides | | 1258 | 975 |
| Caudovirales | | | Bacteria | Bacteroidota | Bacteroidia | Bacteroidales | Tannerellaceae | Parabacteroides | GUT_GENOME000192 | 1255 | 972 |
| Caudovirales | | | Bacteria | Bacteroidota | Bacteroidia | Bacteroidales | Tannerellaceae | Parabacteroides | | 1264 | 1007 |
| Caudovirales | | | Bacteria | Bacteroidota | Bacteroidia | Bacteroidales | Tannerellaceae | Parabacteroides | GUT_GENOME000192 | 1255 | 980 |
| Caudovirales | | | Bacteria | Bacteroidota | Bacteroidia | Bacteroidales | Tannerellaceae | Parabacteroides | GUT_GENOME000192 | 1284 | 1022 |
| Caudovirales | | | Bacteria | Bacteroidota | Bacteroidia | Bacteroidales | Tannerellaceae | Parabacteroides | GUT_GENOME000192 | 1265 | 985 |
| Caudovirales | | | Bacteria | Bacteroidota | Bacteroidia | Bacteroidales | Tannerellaceae | Parabacteroides | GUT_GENOME000192 | 1288 | 1031 |
| Caudovirales | | | Bacteria | Bacteroidota | Bacteroidia | Bacteroidales | Tannerellaceae | Parabacteroides | GUT_GENOME000192 | 1262 | 997 |
| Caudovirales | | | Bacteria | Bacteroidota | Bacteroidia | Bacteroidales | Tannerellaceae | Parabacteroides | GUT_GENOME000192 | 1255 | 972 |
| Caudovirales | | | Bacteria | Bacteroidota | Bacteroidia | Bacteroidales | Tannerellaceae | Parabacteroides | GUT_GENOME000192 | 1259 | 1032 |
| Caudovirales | | | Bacteria | Bacteroidota | Bacteroidia | Bacteroidales | Tannerellaceae | Parabacteroides | GUT_GENOME000192 | 1272 | 1000 |
| Caudovirales | | | Bacteria | Bacteroidota | Bacteroidia | Bacteroidales | Tannerellaceae | Parabacteroides | GUT_GENOME000192 | 1255 | 980 |
| Caudovirales | | | Bacteria | Bacteroidota | Bacteroidia | Bacteroidales | Tannerellaceae | Parabacteroides | GUT_GENOME000192 | 1259 | 1032 |
| Caudovirales | | | Bacteria | Bacteroidota | Bacteroidia | Bacteroidales | Tannerellaceae | Parabacteroides | GUT_GENOME000192 | 1264 | 984 |
| Caudovirales | | | Bacteria | Bacteroidota | Bacteroidia | Bacteroidales | Tannerellaceae | Parabacteroides | GUT_GENOME000192 | 1258 | 975 |
| Caudovirales | | | Bacteria | Bacteroidota | Bacteroidia | Bacteroidales | Tannerellaceae | Parabacteroides | GUT_GENOME000192 | 1255 | 972 |
| Caudovirales | | | Bacteria | Bacteroidota | Bacteroidia | Bacteroidales | Tannerellaceae | Parabacteroides | GUT_GENOME000192 | 1255 | 1033 |
| Caudovirales | | | Bacteria | Bacteroidota | Bacteroidia | Bacteroidales | Tannerellaceae | Parabacteroides | GUT_GENOME000192 | 1265 | 985 |
| Caudovirales | | | Bacteria | Bacteroidota | Bacteroidia | Bacteroidales | Tannerellaceae | Parabacteroides | GUT_GENOME000192 | 1263 | 983 |
| Caudovirales | | | Bacteria | Bacteroidota | Bacteroidia | Bacteroidales | Tannerellaceae | Parabacteroides | GUT_GENOME000192 | 1263 | 1034 |
| Caudovirales | | | Bacteria | Bacteroidota | Bacteroidia | Bacteroidales | Tannerellaceae | Parabacteroides | GUT_GENOME000192 | 1270 | 996 |
| Caudovirales | | | Bacteria | Bacteroidota | Bacteroidia | Bacteroidales | Tannerellaceae | Parabacteroides | GUT_GENOME000192 | 1263 | 983 |
| Caudovirales | | | Bacteria | Bacteroidota | Bacteroidia | Bacteroidales | Tannerellaceae | Parabacteroides | GUT_GENOME000192 | 1281 | 1019 |
| Caudovirales | | | Bacteria | Bacteroidota | Bacteroidia | Bacteroidales | Tannerellaceae | Parabacteroides | GUT_GENOME000192 | 1289 | 1035 |
| Caudovirales | | | Bacteria | Bacteroidota | Bacteroidia | Bacteroidales | Tannerellaceae | Parabacteroides | GUT_GENOME000192 | 1258 | 975 |
| Caudovirales | | | Bacteria | Bacteroidota | Bacteroidia | Bacteroidales | Tannerellaceae | Parabacteroides | GUT_GENOME000192 | 1265 | 985 |
| Caudovirales | | | Bacteria | Bacteroidota | Bacteroidia | Bacteroidales | | | | 1259 | 978 |
| Caudovirales | | | Bacteria | Bacteroidota | Bacteroidia | Bacteroidales | Tannerellaceae | Parabacteroides | GUT_GENOME000192 | 1255 | 1003 |
| Caudovirales | | | Bacteria | Bacteroidota | Bacteroidia | Bacteroidales | Tannerellaceae | Parabacteroides | GUT_GENOME000192 | 1290 | 1036 |
| Caudovirales | | | Bacteria | Bacteroidota | Bacteroidia | Bacteroidales | Tannerellaceae | Parabacteroides | GUT_GENOME000192 | 1264 | 984 |
| Caudovirales | | | Bacteria | Bacteroidota | Bacteroidia | Bacteroidales | Tannerellaceae | Parabacteroides | GUT_GENOME000192 | 1255 | 972 |
| Caudovirales | | | Bacteria | Bacteroidota | Bacteroidia | Bacteroidales | | | | 1255 | 1037 |
| Caudovirales | | | Bacteria | Bacteroidota | Bacteroidia | Bacteroidales | Tannerellaceae | Parabacteroides | GUT_GENOME000192 | 1255 | 972 |
| Caudovirales | | | Bacteria | Bacteroidota | Bacteroidia | Bacteroidales | Tannerellaceae | Parabacteroides | GUT_GENOME000192 | 1255 | 972 |
| Caudovirales | | | Bacteria | Bacteroidota | Bacteroidia | Bacteroidales | Tannerellaceae | Parabacteroides | GUT_GENOME000192 | 1265 | 1038 |
| Caudovirales | | | Bacteria | Bacteroidota | Bacteroidia | Bacteroidales | Tannerellaceae | Parabacteroides | GUT_GENOME000192 | 1263 | 983 |
| Caudovirales | | | Bacteria | Bacteroidota | Bacteroidia | Bacteroidales | Tannerellaceae | Parabacteroides | GUT_GENOME000192 | 1255 | 972 |
| Caudovirales | | | Bacteria | Bacteroidota | Bacteroidia | Bacteroidales | Tannerellaceae | Parabacteroides | GUT_GENOME000192 | 1255 | 972 |
| Caudovirales | | | Bacteria | Bacteroidota | Bacteroidia | Bacteroidales | Tannerellaceae | Parabacteroides | GUT_GENOME000192 | 1265 | 1038 |
| Caudovirales | | | Bacteria | Bacteroidota | Bacteroidia | Bacteroidales | Tannerellaceae | Parabacteroides | GUT_GENOME000192 | 1265 | 985 |
| Caudovirales | | | Bacteria | Bacteroidota | Bacteroidia | Bacteroidales | Tannerellaceae | Parabacteroides | GUT_GENOME000192 | 1291 | 1039 |
| Caudovirales | | | Bacteria | Bacteroidota | Bacteroidia | Bacteroidales | Tannerellaceae | Parabacteroides | GUT_GENOME000192 | 1254 | 971 |
| Caudovirales | | | Bacteria | Bacteroidota | Bacteroidia | Bacteroidales | Tannerellaceae | Parabacteroides | GUT_GENOME000192 | 1254 | 971 |
| Caudovirales | | | Bacteria | Bacteroidota | Bacteroidia | Bacteroidales | Tannerellaceae | Parabacteroides | GUT_GENOME000192 | 1262 | 997 |
| Caudovirales | | | Bacteria | Bacteroidota | Bacteroidia | Bacteroidales | Tannerellaceae | Parabacteroides | GUT_GENOME000192 | 1262 | 997 |
| Caudovirales | | | Bacteria | Bacteroidota | Bacteroidia | Bacteroidales | Tannerellaceae | Parabacteroides | GUT_GENOME000192 | 1254 | 971 |
| Caudovirales | | | Bacteria | Bacteroidota | Bacteroidia | Bacteroidales | Tannerellaceae | Parabacteroides | GUT_GENOME000192 | 1263 | 983 |
| Caudovirales | | | Bacteria | Bacteroidota | Bacteroidia | Bacteroidales | Tannerellaceae | Parabacteroides | GUT_GENOME000192 | 1263 | 983 |
| Caudovirales | | | Bacteria | Bacteroidota | Bacteroidia | Bacteroidales | Tannerellaceae | Parabacteroides | GUT_GENOME000192 | 1255 | 972 |
| Caudovirales | | | Bacteria | Bacteroidota | Bacteroidia | Bacteroidales | Tannerellaceae | Parabacteroides | GUT_GENOME000192 | 1255 | 1040 |
| Caudovirales | | | Bacteria | Bacteroidota | Bacteroidia | Bacteroidales | Tannerellaceae | Parabacteroides | GUT_GENOME000192 | 1254 | 971 |
| Caudovirales | | | Bacteria | Bacteroidota | Bacteroidia | Bacteroidales | Tannerellaceae | Parabacteroides | GUT_GENOME000192 | 1254 | 971 |
| Caudovirales | | | Bacteria | Bacteroidota | Bacteroidia | Bacteroidales | Tannerellaceae | Parabacteroides | GUT_GENOME000192 | 1255 | 1003 |
| Caudovirales | | | Bacteria | Bacteroidota | Bacteroidia | Bacteroidales | Tannerellaceae | Parabacteroides | GUT_GENOME000192 | 1254 | 971 |
| Caudovirales | | | Bacteria | Bacteroidota | Bacteroidia | Bacteroidales | Tannerellaceae | Parabacteroides | GUT_GENOME000192 | 1263 | 983 |
| Caudovirales | | | Bacteria | Bacteroidota | Bacteroidia | Bacteroidales | Tannerellaceae | Parabacteroides | GUT_GENOME000192 | 1258 | 975 |
| Caudovirales | | | Bacteria | Bacteroidota | Bacteroidia | Bacteroidales | Tannerellaceae | Parabacteroides | GUT_GENOME000192 | 1255 | 980 |
| Caudovirales | | | Bacteria | Bacteroidota | Bacteroidia | Bacteroidales | Tannerellaceae | Parabacteroides | GUT_GENOME000192 | 1255 | 972 |
| Caudovirales | | | Bacteria | Bacteroidota | Bacteroidia | Bacteroidales | Tannerellaceae | Parabacteroides | GUT_GENOME000192 | 1292 | 1041 |
| Caudovirales | | | Bacteria | Bacteroidota | Bacteroidia | Bacteroidales | Tannerellaceae | Parabacteroides | GUT_GENOME000192 | 1265 | 1042 |
| Caudovirales | | | Bacteria | Bacteroidota | Bacteroidia | Bacteroidales | Tannerellaceae | Parabacteroides | GUT_GENOME000192 | 1255 | 972 |
| Caudovirales | | | | | | | | | | 1293 | 1043 |
| Caudovirales | | | Bacteria | Bacteroidota | Bacteroidia | Bacteroidales | Tannerellaceae | Parabacteroides | GUT_GENOME000192 | 1259 | 1014 |
| Caudovirales | | | Bacteria | Bacteroidota | Bacteroidia | Bacteroidales | Tannerellaceae | Parabacteroides | GUT_GENOME000192 | 1254 | 971 |
| Caudovirales | | | | | | | | | | 1294 | 1044 |
| Caudovirales | | | | | | | | | | 1294 | 1044 |
| Caudovirales | | | Bacteria | Bacteroidota | Bacteroidia | Bacteroidales | Tannerellaceae | Parabacteroides | GUT_GENOME143131 | 1237 | 953 |
| Caudovirales | Siphoviridae | | Bacteria | Firmicutes_A | Clostridia | Lachnospirales | Lachnospiraceae | Dorea | GUT_GENOME000149 | 1295 | 1045 |

| | | | | | | | | | |
|---|---|---|---|---|---|---|---|---|---|
| Caudovirales | Bacteria | Bacteroidota | Bacteroidia | Bacteroidales | Tannerellaceae | Parabacteroides | GUT_GENOME000192 | 1255 | 972 |
| Caudovirales | Bacteria | Bacteroidota | Bacteroidia | Bacteroidales | Tannerellaceae | Parabacteroides | GUT_GENOME000192 | 1260 | 979 |

[0333] It is appreciated that certain features of the invention, which are, for clarity, described in the context of separate embodiments, may also be provided in combination in a single embodiment. Conversely, various features of the invention, which are, for brevity, described in the context of a single embodiment, may also be provided separately or in any suitable subcombination or as suitable in any other described embodiment of the invention. Certain features described in the context of various embodiments are not to be considered essential features of those embodiments, unless the embodiment is inoperative without those elements.

[0334] Various embodiments and aspects of the present invention as delineated hereinabove and as claimed in the claims section below find experimental support in the following examples.

### EXAMPLES

[0335] Reference is now made to the following examples, which together with the above descriptions illustrate some embodiments of the invention in a non limiting fashion.

### Materials and Methods for Examples 1-4

[0336] Phage strains, isolation and cultivation—B. subtilis phages, phi3T (BGSCID 1L1), SPO (BGSCID 1L5) and SPR (BGSCID 1L56) were obtained from the Bacillus Genetic Stock Center (BGSC). Other phages used in the study were isolated from soil samples on B. subtilis BEST7003 culture as described in Doron et al¹⁹. To this end, soil samples were added to a log phase B. subtilis BEST7003 culture and incubated overnight to enrich for B. subtilis phages. The enriched sample was centrifuged and filtered through 0.2 μm filters, and the filtered supernatant was used to perform double layer plaque assays as described in Kropinski et al.⁴⁰. Single plaques that appeared after overnight incubation were picked and re-isolated 3 times, and amplified as described below. Phages were propagated by picking a single phage plaque into a liquid culture of B. subtilis BEST7003 grown at 37° C. to OD600 of 0.3 in MMB medium until culture collapse. The culture was then centrifuged for 10 minutes at 4000 rpm and the supernatant was filtered through a 0.2 μm filter to get rid of remaining bacteria and bacterial debris. Phage titer was determined using the small drop plaque assay method⁴¹. Briefly, 300 μl of overnight culture of bacteria were mixed with 25 ml MMB, 0.5% agar supplemented with 1 mM IPTG solution and poured into a 10 cm square plate followed by incubation for 1 hour at room temperature. The phage stock was tenfold serially diluted allowing 10 μl drops of diluted phage lysate to be placed on the solidified agar. After the drops have dried up, the plates were inverted and incubated at room temperature overnight, and plaques were counted to determine phage titer. Efficiency of plating (EOP) was measured by performing small drop plaque assay with the same phage lysate on control bacteria and bacteria containing the candidate anti-defense gene and defense system, and comparing the ratio of plaque formation. When individual plaques could not be counted due to small size, a faint lysis zone across the drop area was considered to be 10 plaques.

[0337] B. subtilis BEST7003 transformation with defense systems—B. subtilis BEST7003 cells (Doron et al. Science (2018) 359(6379): eaar4120) containing a heterologous Gabija, Thoeris (specifically, from Bacillus cereus MSX-D12), Hachiman, Septu, Lamassu and Shedu or DSR2 defense systems (SEQ ID NO: 740-746, respectively), integrated into the amyE locus, were generated. As a negative control, a transformant with plasmid containing GFP was used. Transformation to B. subtilis was performed using MC medium as previously described (Wilson, G. A. & Bott, K. F. J. Bacteriol. 95, 1439-1449 (1968)]. MC medium was composed of 80 mM K2HPO4, 30 mM KH2PO4, 2% Glucose, 30 mM Trisodium citrate, 22 μg/ml Ferric ammonium citrate, 0.1% Casein Hydrolysate (CAA) and 0.2% potassium glutamate. From an overnight starter of bacteria, 30 μl were diluted in 3 ml of MC medium supplemented with 30 μl 1M MgSO4. When the culture reached 0.6 OD (37° C., 200 rpm), 300 μl was transferred to a new 15 ml tube and ˜300 ng of plasmid DNA was added. The tube was incubated for another 3 hours (37° C., 200 rpm) and the entire reaction was plated on LB agar plates supplemented with 5 μg/ml Chloramphenicol and 100 μg/ml spectinomycin and incubated overnight at 30° C. Whole-genome sequencing was then applied to all transformed B. subtilis to verify system's integrity and lack of mutations.

[0338] Cloning of candidate systems into B. subtilis BEST7003 containing defense systems —The DNA of each anti-defense gene was synthesized (Genscript Corp.) or amplified from the source phage genome using KAPA HiFi HotStart ReadyMix (Roche cat #KK2601). Following, the anti-defense gene was cloned into pSG-thrC-phSpank vector. The vector contains a p15a origin of replication and ampicillin resistance for plasmid propagation in E. coli; and a thrC integration cassette with Chloramphenicol resistance for genomic integration into B. subtilis. Systems amplified from genomic DNA were cloned using NEBuilder HiFi DNA Assembly cloning kit (NEB E5520S) and were transformed to DH5q competent cells, resulting in a plasmid containing an anti-defense gene. The cloned vector was transformed into B. subtilis BEST7003 cells containing Gabija, Thoeris and Hachiman defense systems, integrated into the amyE locus, as described hereinabove.

[0339] DNA-seq—DNA was extracted from bacteria and phages using Qiagen DNeasy blood and tissue kit (Qiagen 69504). DNA libraries were constructed using the Nextera library preparation protocol as previously published⁴². All libraries were sequenced using the Illumina NextSeq500. The sequencing reads were aligned to the reference genomes of B. subtilis BEST7003 (Genbank: AP012496) and Bacillus phages.

[0340] GAD1 Knockout in phi3T lysogenic strain—Plasmid vector pJmp3 was used for generating the gene knockout plasmid. This vector was also used as a template for generating the Spectinomycin resistance gene cassette. The upstream homologous arm and downstream homologous arm of GAD1 (SEQ ID NO: 16) were amplified from phi3T phage genome by PCR using the following primers: Primers ‘AL_GAD1_A_F’ (SEQ ID NO: 747) and ‘AL_GAD1_A_R’ (SEQ ID NO: 748) were used to amplify the upstream homologous arm of GAD1 from phi3T phage genome. Primers ‘AL_GAD1_B_F’ (SEQ ID NO: 749) and ‘AL_GAD1_B_R’ (SEQ ID NO: 750) were used to amplify the downstream homologous arm of GAD1 from phi3T phage genome. Primers ‘AL-SPEC_F’ (SEQ ID NO: 751) and ‘AL_spec_R’ (SEQ ID NO: 752) were used to amplify Spectinomycin resistance gene cassette from Jmp3 plasmid. These three parts were cloned into pJmp3 backbone using NEBuilder HiFI DNA Assembly cloning kit (NEB E5520S) and transformed to DH5q competent cells. The cloned vector was transformed into phi3T lysogenic strain (BGSCID 1L1).

[0341] NAD levels measurements—Overnight cultures were diluted 1: 100 in 350 ml MMB supplemented with 1 mM IPTG and grown at 37° C. while shaking at 200 rpm for 90 minutes. The culture was then incubated at 25° C. while shaking at 200 rpm until reaching an OD600 of 0.3. At OD600 of 0.3 a sample of 50 ml for uninfected culture (time 0) was then removed. Following, SBSphiJ phage stock was added to the culture to reach MOI of 5. Flasks were incubated at 25° C. while shaking at 200 rpm for the duration of the experiment. 50 ml samples were collected at times 75, 90, 105, 120 minutes post infection. Immediately upon sample removal (including time 0), the sample tubes were placed on ice and centrifuged at 4° C. for 10 minutes to pellet the cells. The supernatant was discarded and the tube was flesh freezed and stored at −80° C. To extract the metabolites, 600 μl of 100 mM phosphate buffer, pH 8.0, supplemented with 4 mg/ml lysozyme (Sigma cat #L6876) was added to each pellet. Following, the tubes were incubated for 10 minutes at 25° C., and returned to ice. The samples were transferred to a FastPrep Lysing Matrix B in a 2 ml tube (MP Biomedicals cat #116911100) and lysed using FastPrep bead beater for 2×40 seconds at 6 m/s. Tubes were then centrifuged at 4° C. for 10 minutes at 15,000 g. The supernatant was transferred to Amicon Ultra-0.5 Centrifugal Filter Unit 3 kDa (Merck Millipore cat #UFC500396) and centrifuged for 45 minutes at 4° C. at 12,000 g. Filtrates were taken for LC-MS analysis or for detection using an enzymatic NADase activity assay.

[0342] NADase activity assay—NADase assay was performed using the ThsA enzyme as a reporter for the presence of variant-cyclic ADPr²⁸. The ThsA protein, was expressed under the control of T7 promoter together with a C-terminal Twin-Strep tag for subsequent purification. Expression was performed in LB medium supplemented with chloramphenicol (34 mg/ml) in E. coli BL21(DE3) cells. Induction was performed with 200 μM IPTG at 15° C. overnight. The culture was harvested and lysed by a cooled cell disrupter (Constant Systems) in lysis buffer composed of 20 mM Hepes 7.5, 0.3 M NaCl, 10% glycerol and 5 mM β-mercaptoethanol, 200 KU/100 ml lysozyme, 20 μg/ml DNase, 1 mM MgCl2, 1 mM phenylmethylsulfonyl fluoride (PMSF) and protease inhibitor cocktail (Millipore cat #539134, EDTA-free Protease Inhibitor Cocktail Set III). Cell debris was sedimented by centrifugation, and the lysate supernatant was incubated with washed StrepTactin XT beads (IBA cat #2-5030-025) for 1 hour at 4° C. The sedimented beads were then packed into a column connected to an FPLC allowing the lysate to pass through the column at 1 ml/min. The column was washed with 20 ml lysis buffer. The ThsA variants were eluted from the column using elution buffer containing 50 mM Biotin, 100 mM Tris 8, 150 mM NaCl, and 1 mM EDTA. Peaks containing ThsA were injected to a size exclusion (SEC) column (Superdex 200_16/60, GE Healthcare cat #28-9893-35) equilibrated with SEC buffer (20 mM HEPES pH 7.5, 200 mM NaCl, 2 mM DTT). Monomer peak was collected from the SEC column, aliquoted and frozen at −80° C. to be used for subsequent experiments. NADase reaction was performed in black 96-well half area plates (Coming cat #3694). In each reaction microwell, ThsA purified protein was added to cell lysate or 100 mM sodium phosphate buffer yielding a final 50 μl reaction volume. 5 μl of 5 mM Nicotinamide 1, N6-ethenoadenine dinucleotide (FNAD, Sigma cat #N2630) solution were added to each well immediately prior to the beginning of measurements and mixed by pipetting to reach a concentration of 500 μM in the 50 μl final volume reaction. FNAD was used as a substrate to report NADase activity of the ThsA enzyme. Plates were incubated inside a Tecan Infinite M200 plate reader at 25° C., and measurements were taken every 1 minute at 300 nm and 410 nm excitation and emission wavelengths, respectively. Reaction rate was calculated from the linear part of the initial reaction. In cases where the initial reaction rate was too high and led to saturation, the lysate was diluted 1: 1 in 100 mM phosphate buffer and the reaction re-measured.

[0343] Pulldown of ThsA, ThsB, TAD1 —ThsA and ThsB were cloned as an operon under the arabinose-inducible promoter on pBAD plasmid. The TAD1 gene (SEQ ID NO: 5) with a C-terminal His-tag was cloned into plasmid pBbA6c⁴³. Both plasmids were co-transformed into E. coli MG1655 strain. Overnight cultures containing the pBAD-ThsA-ThsB and pBbA6c-TAD1-His constructs were diluted 1: 100 in 100 ml MMB and grown at 25° C. while shaking at 200 rpm. 1 mM IPTG and 0.2% arabinose were added at OD600 of 0.3 followed by cell harvesting 3 hours later by centrifugation at 4000 rpm, 4° C. Pellets were stored at −80° C. and then lysed with 250 μl 50 mM NaPhosphate buffer pH 8.0, 0.1 M NaCl and 1 mg/ml lysozyme (Sigma cat #L6876). Pellets resuspended with lysozyme were shaken for 10 minutes at 25° C. After 10 minutes, 750 μl of NTA-washing buffer containing Phosphate buffer 20 mM pH 7.4, 0.5M NaCl, 20 mM imidazole and 0.05% Tween 20. These samples were transferred to a FastPrep Lysing Matrix B in a 2 ml tube (MP Biomedicals cat #116911100) and lysed using FastPrep bead beater for 2×40 seconds at 6 m/s. Tubes were then centrifuged at 4° C. for 10 minutes at 15,000 g. The supernatant was then applied to magnetic Ni-NTA-magnetic beads (Qiagen 36113) and washed twice with 0.5 ml NTA-washing buffer, followed by elution with NTA-washing buffer containing 500 mM imidazole. Protein samples containing TAD1-His co-expressed with ThsA and ThsB were compared to TAD1-His alone or ThsA/ThsB without TAD-His by running on a Bolt™ 4 to 12%, Bis-Tris (Thermofisher NWO4122BOX).

[0344] Construction of dCAS9 and gRNA cassette for integration to Bacillus Subtilis thrC site —dCAS9 from Streptococcus pyogenes together with its xyl promotor and xylR were amplified from plasmid pJMP1 (addgene plasmid #79873) and the gRNA scaffold with spacer and promoter were amplified from pJMP3 (addgene plasmid #79875). Both were cloned into the pSG-thrC_phSpank_sfGFP vector. New spacers were inserted by using the overlap of primers used for NEBuilder HiFi DNA Assembly (NEB, cat #E2621). Shuttle vectors were propagated in E. coli DH5a using a p15a origin of replication with 100 μg/ml ampicillin selection. Plasmids were miniprepped from E. coli DH5a prior to transformation into the appropriate B. subtilis BEST7003 strains. The gRNA sequence that was used to target TAD1 is ‘GGAACCACTACGAAATGAT’ (SEQ ID NO: 754). The gRNA sequence that was used to target HAD1 is ‘GCTTGCTAGGATTAGTGTCC’ (SEQ ID NO: 755). The gRNA sequence that was used as the control (doesn't target TAD1 or HAD1) is ‘ctatgattgatttttttagc’ (SEQ ID NO: 756).

[0345] LC-MS analysis of v-cADPR—Sample analysis was carried out by MS-Omics as follows. The analysis was carried out using a Thermo Scientific Vanquish LC coupled to Thermo Q Exactive HF MS. An electrospray ionization interface was used as ionization source. Analysis was performed in positive ionization mode with an m/z range of 200-1000. The UPLC was performed using a slightly modified version of the protocol described Hsiao et al. 2018 (DOI 10.1021/acs.analchem.8b02100). Peak areas were extracted using Compound Discoverer 3.1 (Thermo Scientific). Identification of compounds were performed at four levels; Level 1: identification by retention times (compared against in-house authentic standards), accurate mass (with an accepted deviation of 3 ppm), and MS/MS spectra, Level 2a: identification by retention times (compared against in-house authentic standards), accurate mass (with an accepted deviation of 3 ppm). Level 2b: identification by accurate mass (with an accepted deviation of 3 ppm), and MS/MS spectra, Level 3: identification by accurate mass alone (with an accepted deviation of 3 ppm).

[0346] Genome assembly and open reading frames (ORFs) prediction—First, adapter sequences were removed from the reads of each phage genome using Cutadapt version 2.844 with the option -q 5 (quality threshold 5). The trimmed reads from each phage genome were assembled into scaffolds using SPAdes genome assembler version 3.14.045, using the -careful flag. Each assembled genome was analyzed with Prodigal version 2.6.3⁴⁶ (default parameters) to predict ORFs.

[0347] Anti-defense candidate prediction—To find candidate anti-defense genes, the protein sequences from all the phages in each phage family were clustered into groups of homologs using the cluster module in MMSeqs2 release 12-113e3⁴⁷, with the parameters -e 10, -c 0.8, -s 8, --min-seq-id 0.3 and the flag -single-step-clustering. Overall, 540 unique clusters in the SpBeta-like group, and 320 unique clusters in the SBSphiJ-like group were obtained. Next, each cluster was mapped to a list of phages that have a member of that cluster in their genome. For each defense system, anti-defense candidates were defined as clusters that have a representation in all the phages that overcome the defense system and are absent from all the phages that are blocked by the defense system. One member was chosen from each cluster as a candidate anti-defense gene for further experimental testing. In the case of the Hachiman defense system, where 9 anti-defense candidates were found, genes that are similar to housekeeping genes were neglected, while 3 candidates that are not similar to any gene with a known function were chosen for further analysis.

[0348] Identification of anti-defense homologs —All homologs were Identified by searching the anti-defense protein sequences in the integrated microbial genomes (IMG)³⁸ and the metagenomic gut virus (MGV)³⁹ databases. Homologs of GAD1 and HAD1 in the IMG database were found by using the blast option in the IMG web server (GAD1 homologs were searched using the default parameters, while HAD1 homologs were searched using an e-value of 10), and additional homologs were added manually by using the “top IMG homolog hits” option on IMG. Homologs of TAD1 were found by searching TAD1 against 38,000 genomes that were downloaded from the IMG database in October 2017, using the “search” option of MMseqs release 12-113e3 with default parameters. Homologs in the MGV databases were found for GAD1 and TAD1 using the “search” option of MMseqs release 12-113e3 with default parameters. HAD1 homologs were not found in the MGV database. The sequences were filtered for redundancy, keeping one representative for each unique sequence. Overall, 255/63/16 unique homologs for TAD1/GAD1/HAD1, respectively, were identified, see Tables 6-10 hereinabove.

[0349] Phylogenetic trees constructions and visualization—For each family of anti-defense proteins, the unique sequences were aligned using MAFFT version 7.402⁴⁸ with default parameters. The trees were constructed using IQ-TREE version 1.6.549 with the -m LG parameter. The online tool iTOL24 (v.5)⁵⁰ was used for tree visualization. Phage family annotations are based on the prediction in the MGV database. The host phyla annotations are based on the prediction in the MGV database, or the lysogen's taxonomy. Gabija and Thoeris defense systems were found in the bacterial genomes by searching for the respective pfam/COG annotations (only cases where the two genes of Gabija/Thoeris are found next to each other on the genome were collected).

[0350] Knock-in of TAD1 into phage SBSphiJ—The DNA sequence of TAD1, together with its upstream intergenic region, was amplified from the genome of phage SBSphiJ7 using KAPA HiFi HotStart ReadyMix (Roche, no. KK2601) with the primer pair CAACTGAGTAAATAAATAGAGCCTAGTGTAACGAC and CTTTGCCAAGTGTTTTCCCTCCA (SEQ ID Nos: 1303-1304). The upstream and downstream genomic arms (±1.2 kbp) for the integration site of the TAD1 insert within the SBSphiJ genome were amplified from the genome of phage SBSphiJ using the primer pair ACTCTTGTTAACTCTAGAGCTATGTCATTCTTAGACATTGTAAACCAAGAAGCAG and GGCTCTATTTATTTACTCAGTTGGCAAGTCTCC (SEQ ID Nos: 1305-1306) and the primer pair GGAAAACACTTGGCAAAGAAGAAAAAACAGAATAATGTATCC and TAGCGAAAAATCCTTTTCTTTCTTACCCTTCTCCATCAGTGTTCAATAAATCATC (SEQ ID Nos: 1307-1308), respectively. The three fragments were cloned into the pSG-thrC-Phspank backbone using the NEBuilder HiFI DNA Assembly cloning kit (NEB, no. E5520S) and transformed to DH5α-competent cells. The cloned vector was subsequently transformed into the thrC site of B. subtilis BEST7003. The TAD1-containing B. subtilis BEST7003 strain was then infected with phage SBSphiJ with an MOI of 0.1 and cell lysate was collected. The lysate was used to infect a Thoeris-containing B. subtilis culture in two consecutive rounds with an MOI of 2. Several plaques were collected and screened using PCR for TAD1-containing phages. A TAD1-contaning phage was purified three times on B. subtilis BEST7003. Purified phage was verified again for the presence of TAD1 using PCR amplification. Whole-genome sequencing was then applied to the phage to verify the integrity of the TAD1 knock-in.

### Materials and Methods for Example 5

[0351] Bacterial strains and phages—E. coli strain MG1655 (ATCC 47076) was grown in MMB (LB+0.1 mM MnCl2÷5 mM MgCl2, with or without 0.5% agar) at 37° C. or room temperature (RT). Whenever applicable, media were supplemented with ampicillin (100 μg/ml), to ensure the maintenance of plasmids. Infection was performed in MMB media at 37° C. or RT as detailed in each section. B. subtilis strain BEST7003 was grown in MMB (LB+0.1 mM MnCl2+5 mM MgCl2, with or without 0.5% agar) at 37° C. or room temperature (RT). Whenever applicable, media were supplemented with spectinomycin (100 jig/ml) and chloramphenicol (5 μg/ml), to ensure selection of transformed and integrated cells. Infection was performed in MMB media at 37° C. or RT as detailed in each section. Plasmid and strain construction —The defense system DSR2 was synthesized by Genscript Corp. and cloned into the pSG1 plasmid [Doron, S. et al. Science 359, eaar4120 (2018)] with its native promoter. DSR2(N133A) and DSR2(H171A) mutants of the DSR2 gene were constructed using Q5 Site-directed Mutagenesis kit (NEB). DSAD1 and tail-tube were amplified from phage genomic DNA and cloned into the pSG-thrC_phSpank_sfGFP vector. Inducible DSR2, and DSR2(H171A) were amplified and cloned into the plasmid pBbA6c-RFP (Addgene, cat. #35290). Inducible tail-tube, tail-tube with C-terminal twin streptavidin, and DSAD1 with C-terminal twin streptavidin were amplified and cloned into the plasmid pbBS8k-RFP (Addgene, cat. #35323).

[0352] Bacillus transformation—Transformation to B. subtilis BEST7003 was performed using MC medium as previously described (Wilson, G. A. & Bott, K. F. J. Bacteriol. 95, 1439-49 (1968)]. MC medium was composed of 80 mM K2-IP04, 30 mM KH2PO4, 2% glucose, 30 mM trisodium citrate, 22 Vg/ml ferric ammonium citrate, 0.1% casein hydrolysate (CAA), 0.2% potassium glutamate. From an overnight starter of bacteria, 10 μl were diluted in 1 ml of MC medium supplemented with 10 μl 1M MgSO4. After 3 hours of incubation (37° C., 200 rpm), 300 μl of the culture was transferred to a new 15 ml tube and ˜200 ng of plasmid DNA was added. The tube was incubated for another 3 hours (37° C., 200 rpm), and the entire reaction was plated on Lysogeny Broth (LB) agar plates supplemented with 5 μg/ml chloramphenicol or 100 μg/ml spectinomycin and incubated overnight at 30° C. Plaque assays—Phages were propagated by picking a single phage plaque into a liquid culture of B. subtilis BEST7003 or E. coli MG1655 grown at 37° C. to OD₆₀₀ 0.3 in MMB medium until culture collapse. The culture was then centrifuged for 10 minutes at 4000 r.p.m and the supernatant was filtered through a 0.2 m filter to get rid of remaining bacteria and bacterial debris. Lysate titer was determined using the small drop plaque assay method as described [Mazzocco, A., Waddell, T. E., Lingohr, E. & Johnson, R. P. Methods in molecular biology (Clifton, N.J.) 501, 81-5 (2009)]. Plaque assays were performed as previously described ([Doron, S. et al. Science 359, eaar4120 (2018); Mazzocco, A., Waddell, T. E., Lingohr, E. & Johnson, R. P. Methods in molecular biology (Clifton, N.J.) 501, 81-5 (2009)]. Bacteria containing defense system and control bacteria with no system were grown overnight at 37° C. Then 300 μl of the bacterial culture was mixed with 30 ml melted MMB 0.5% agar, poured on 10 cm square plates, and let to dry for 1 hour at room temperature. For cells that contained inducible constructs, the inducers were added to the agar before plates were poured. 10-fold serial dilutions in MMB were performed for each of the tested phages and 10 μl drops were put on the bacterial layer. After the drops had dried up, the plates were inverted and incubated at room temperature or 37° C. overnight. Plaque forming units (PFUs) were determined by counting the derived plaques after overnight incubation and lysate titer was determined by calculating PFUs per ml. When no individual plaques could not be identified, a faint lysis zone across the drop area was considered to be 10 plaques.

[0353] Phage-infection dynamics in liquid medium—Non-induced overnight cultures of bacteria containing defense system and bacteria with no system (negative control) were diluted 1 : 100 in MMB medium supplemented with appropriate antibiotics and incubated at 37° C. while shaking at 200 rpm until early log phase (OD600=0.3). 180 μl of the diluted culture were transferred into wells in a 96-well plate containing 20 μl of phage lysate for a final MOI of 4 and 0.04, or, 20 μl of MMB for uninfected control. Infections were performed in triplicates from overnight cultures prepared from separate colonies. Plates were incubated at 30° C. or 37° C. with shaking in a TECAN Infinite200 plate reader and OD600 was measurement was taken every 10 minutes.

[0354] Liquid medium growth toxicity assay—Non-induced E. coli with DSR2 and tail tube, and RFP and DSR2 (negative control), were grown in 1% glucose overnight. Cells were diluted 1: 100 in 3 ml of mmb and grown at 37° C. to an OD of 0.3 before being induced. Uninduced cells and cells induced at 0.2% arabinose and 1 mM IPTG, were transferred into a 96-well plate. Plates were incubated at 37° C. with shaking in a TECAN Infinite200 plate reader and a OD₆₀₀ measurement was taken every 10 minutes.

[0355] Cell lysate preparation for LC-MS—Overnight cultures of Bacteria containing defense system and Bacteria with no system (negative control) were diluted 1: 100 in 250 ml MMB and incubated at room temperature or 37° C. with shaking (200 rpm) until reaching OD₆₀₀ of 0.3. For cells that contained inducible constructs, the inducers were added at an OD₆₀₀ of 0.1. A sample of 50 ml of uninfected culture (time 0) was then removed, and phage stock was added to the culture to reach MOI of 5-10. Flasks were incubated at 30° C. or 37° C. with shaking (200 rpm) for the duration of the experiment. 50 ml samples were collected at various time points post infection. Immediately upon sample removal the sample tube was placed in ice, centrifuged at 4° C. for 5 minutes to pellet the cells. The supernatant was discarded and the tube was frozen at −80° C. To extract the metabolites, 600 μl of 100 mM phosphate buffer at pH 8, supplemented with 4 mg/ml lysozyme, was added to each pellet. Tubes were then incubated for 5 minutes at 37° C., and returned to ice. Thawed sample was transferred to a FastPrep Lysing Matrix 2 ml tube (MP Biomedicals cat #116911100) and lysed using FastPrep bead beater for 40 seconds at 6 m/s. Tubes were then centrifuged at 4° C. for 15 minutes at 15,000 g. Supernatant was transferred to Amicon Ultra-0.5 Centrifugal Filter Unit 3 KDa (Merck Millipore cat #UFC500396) and centrifuged for 45 minutes at 4° C. at 12,000 g. Filtrate was taken and used for LC-MS analysis.

[0356] Quantification of NAD⁺ and ADPR by HPLC-MS—Cell lysates were prepared as described above and analyzed by LC-MS/MS. Quantification of nucleotides was carried out using an Acquity I-class UPLC system coupled to Xevo TQ-S triple quadrupole mass spectrometer (both Waters, US). The UPLC was performed using an Atlantis Premier BEH C18 AX column with the dimension of 2.1×100 mm and particle size of 1.7 μm (Waters). Mobile phase A was 20 mM ammonium formate at pH 3 and acetonitrile was mobile phase B. The flow rate was kept at 300 μl/min consisting of a 2 minutes hold at 2% B, followed by linear gradient increase to 100% B during 5 minutes. The column temperature was set at 25° C. and an injection volume of 1 μl. An electrospray ionization interface was used as ionization source. Analysis was performed in positive ionization mode. Metabolites were detected using multiple-reaction monitoring, using argon as the collision gas. Quantification was made using standard curve in 0-1 mM concentration range. NAD+(Sigma) and ADPR (Sigma) were added to standards and samples as internal standard (0.5 μM). TargetLynx (Waters) was used for data analysis.

[0357] Pulldown assays of the DSR2-DSAD1 and DSR2-tail tube complex—Non-induced overnight cultures of E. coli with DSR2(H171A), DSAD1 with C-terminal Streptavidin tag, tail-tube with C-terminal Streptavidin tag, DSR2(H171A) and DSAD1 with C-terminal Streptavidin tag, and DSR2(H171A) and tail-tube with C-terminal Streptavidin tag were diluted 1: 100 in 50 ml of mmb and grown at 37° C. to an OD of 0.3. Cells were induced with 0.2% arabinose and 1 mM IPTG and continued to grow to an OD of 0.9 at 37° C. Cells were centrifuged at 4000 rpm for 10 minutes. Supernatant was discarded and pellets were frozen in −80° C. To pulldown the proteins, 1 ml of Strep wash buffer (IBA cat #2-1003-100) supplemented with 4 mg/ml lysozyme was added to each pellet and incubated for 10 minutes at 37° C. with shaking until thawed and resuspended. Tubes were then transferred to ice, and the resuspended cells transferred to a FastPrep Lysing Matrix B in 2 ml tube (MP Biomedicals cat #116911100). Samples were lysed using FastPrep bead beater for 40 seconds at 6 m/s. Tubes were centrifuged for 15 minutes at 15,000 g. Per each pellet, 30 μl of MagStrep “Type 3” XT beads (IBA cat #2-4090-002) were washed twice in 300 μl wash buffer, and the lysed cell supernatant was mixed with the beads and incubated for 30-60 minutes, rotating in 4° C. The beads were then pelleted on a magnet, washed twice with wash buffer, and purified protein was eluted from the beads in 10 μl of BXT elution buffer (IBA cat #2-1042-025). 30 μl of samples were mixed with 10 μl of 4× Bolt™ LDS Sample Buffer (ThermoFisher cat #B0008) and a final concentration of 1 mM of DTT. Samples were incubated at 75° C. for 5 minutes. Samples were loaded to a NuPAGE™ 4 to 12%, Bis-Tris, 1.0 mm, Mini Protein Gel, 12-well (ThermoFisher cat #NP0322PK2) in 20× Bolt™ MES SDS Running Buffer (ThermoFisher cat #B0002) and run at 160V. Gels were shaken with InstantBlue® Coomassie Protein Stain (ISB1L) (ab119211) for 1 hour, followed by another hour in water.

[0358] Phage coinfection and hybrid isolation—50 μl overnight culture of B. subtilis containing pVip and DSR2 was mixed with 50 μl of SPR and phi3T or SPR and SPbeta at a titer of 10⁷ pfu/ml. The Bacteria and phages were left to rest at RT for 10 minutes before being mixed with 5 ml of warm MMB 0.3% agar and poured over a low plate of MMB 0.5% agar. Plates were left overnight at RT before being inspected for plaques. Single plaques were picked into 100 μl phage buffer. To test the recombinant phages progeny for the ability to overcome pVip and dsr2 defense, the small drop plaque assay was used [Mazzocco, A., Waddell, T. E., Lingohr, E. & Johnson, R. P. Methods in molecular biology (Clifton, N.J.) 501, 81-5 (2009)]. 300 μl B. subtilis with pVip and DSR2 or negative control (No system) were mixed with 30 mL melted 0.5% and let to dry for 1 hour at room temperature. 10-fold serial dilutions in phage buffer was performed for the recombinant phages and 10 μl drops were put on the bacterial layer. The plates were incubated overnight at room temperature. Efficiency of plating (EOP) was measured and compared between the defense and NC strain.

[0359] Sequencing and assembly of phage hybrids—High titer phage lysates (>10⁷ pfu/ml) of the ancestor and isolated phage hybrids were used for DNA extraction. 500 ml of the phage lysate was treated with DNase-I (Merck cat #11284932001) added to a final concentration of 20 mg/ml and incubated at 37° C. for 1 hour to remove bacterial DNA. DNA was extracted using the QIAGEN DNeasy blood and tissue kit (cat #69504) starting from the Proteinase-K treatment step to lyse the phages. Libraries were prepared for Illumina sequencing using a modified Nextera protocol as previously described (Baym M, Krvazhimskiy S, Lieberman TD, Chung Ul, Desai MM, Kishony R (2015) Inexpensive Multiplexed Library Preparation for Megabase-Sized Genomes. PLoS ONE 10(5): e0128036). Reads were de novo assembled using Spades3.14.0.

[0360] Hybridphage alignment—Hybrid phage genomes were aligned using SnapGene Version 5.3.2. Each hybrid genome was aligned to phage SPR and areas that did not align were aligned against the other phages in the coinfection experiment in order to verify their origin and gene content.

### Materials and Methods for Example 6

[0361] Phage strains, isolation and cultivation—phage SPO1 was obtained from the Bacillus Genetic Stock Center (BGSC). Phages SPO1L1, SPO1L2, SPO1L3, SPO1L4 and SPO1L5 were isolated and cultivated as described in the Materials and Methods for Examples 1-4 hereinabove.

[0362] B. subtilis BEST7003 transformation with Thoeris and Tad2 —Transformations of Thoeris defense systems from Bacillus cereus MSX-D12 (SEQ ID NO: 741) and Bacillus amyloliquefaciens Y2 (SEQ ID NO: 1300) and the TAD2 anti Thoeris gene and its homologs (SEQ ID Nos: 757-762) into B. subtilis BEST7003 cells were performed as described in the Materials and Methods for Examples 1-4 hereinabove.

[0363] Construction of dCAS9 and gRNA cassette for integration to Bacillus Subtilis thrC site —Construction of the dCAS9 and gRNA cassette for integration to B. Subtilis thrC site was performed as described in the materials and methods for examples 1-4 hereinabove with the following modifications. The gRNA sequence that was used to target TAD2 is ‘AAGATGATGTTCCCAAACAC’ (SEQ ID NO: 1309). The gRNA sequence that was used as the control (doesn't target TAD2) is ‘GGAACCACTACGAAATGAT’ (SEQ ID NO: 754).

[0364] Open reading frames (ORFs) prediction and anti-thoeris candidate prediction—ORFs were predicted in each phage genome as described in the Materials and Methods for Examples 1-4 hereinabove. The anti Thoeris gene (Tad2) was predicted by comparing the gene content of resistant and sensitive phages to the Thoeris defense system from Bacillus cereus MSX-D12, as described in the Materials and Methods for Examples 1-4 hereinabove.

[0365] Identification of TAD2 homologs and Phylogenetic trees constructions and visualization—All TAD2 homologs were identified by searching the integrated microbial genomes (IMG)³⁸ and the metagenomic gut virus (MGV)³⁹ databases as described for Tad1 in the Materials and Methods for Examples 1-4 hereinabove. The TAD2 phylogenetic tree was constructed and visualized as described in the Materials and Methods for Examples 1-4 hereinabove.

[0366] NADase activity assay —NADase activity assay was performed as described in the Materials and Methods for Examples 1-4 hereinabove with the following modification. Instead of incubating purified ThsA with infected cell lysates, ThsA was incubated with 900 nM of 1″-3′gcADPR (the ThsB-derived signaling molecule) that was preincubated with 24 uM of purified TAD2 for 10 minutes, followed by an additional incubation of 5 minutes at either 25° C. or 95° C.

### Example 1

Identification of Phage Genes that Inhibit Bacterial Defense Systems

[0367] The present inventors set out to find whether some Bacillus phages can directly inhibit previously identified and described defense systems¹⁹ that protect Bacillus species from phage infection. Multiple studies demonstrated that anti-CRISPR genes are sporadically present in closely related phages, and that the presence or absence of these genes directly affects the phage sensitivity to CRISPR-Cas³¹⁻³³ Hence, it was hypothesized that genes inhibiting the new defense systems would show a similar sporadic distribution among phages, and that such genes could be predicted by examining the defense profiles and gene content of closely-related phages (FIG. 1A). To this end, two groups of closely-related phages that infect Bacillus subtilis were isolated and analyzed. One group included eight phages similar to phage SBSphiJ, a lytic Myoviridae phage with a ˜150 kb-long genome¹⁹. Between 89% and 100% of the genome was alignable when comparing pairs of phages from this group, with high (90%-100%) sequence identity in alignable regions (FIG. 1B; Tables 1-2 hereinbelow). Furthermore, eight phages were isolated from the SpBeta group, which also includes the previously isolated phages SpBeta, phi3T and SPR³⁴⁻³⁶. These are temperate Siphoviridae with ˜130 kb genomes, with 43%-96% alignable genomes when comparing phage pairs (FIG. 9, Tables 3-4 hereinbelow). Each phage had, on average, 4.5 (SBSphiJ) or 16.9 (SpBeta) genes that were not found in the genomes of other phages in the same group (data not shown).

[0368] Following, these two groups of phages were used to infect strains of Bacillus subtilis that heterologously expressed each of the defense systems described in Doron et al¹⁹, namely Thoeris (specifically, from Bacillus cereus MSX-D12), Hachiman, Gabija, Septu, Lamassu and Shedu. Five of these systems protected against at least one of the phages tested (FIG. 1C). However, phages from the same group displayed remarkably different properties when infecting defense-system-containing bacteria. For example, the Thoeris defense system protected against all phages of the SBSphiJ group except for phage SBSphiJ7, and the Hachiman defense system protected against all phages of the SBSphiJ group except for phage SBSphij4 (FIG. 1C).

[0369] To identify phage genes that may explain the differential defense phenotype, the gene content in groups of phages that overcame each defense system were analyzed, and compared to the gene content in phages that were blocked by the system. Genes common to phages that overcame the defense system, which were not found in any of the phages that were blocked by defense system, were considered as candidate anti-defense genes and were further examined experimentally, as described hereinbelow.

### Example 2

### Tad1 as an Anti-Thoeris Gene

[0370] Thoeris (also known as “SIR2-TIR system”) is a common defense system found in about 4% of sequenced bacterial and archaeal genomes¹⁹. This defense system includes one or more genes with a Toll/interleukin-1 receptor (TIR) domain, which serve as sensors for phage infection²⁸. Once triggered by phage, Thoeris TIR proteins generate a signaling molecule that was shown to be an isomer of cyclic ADP-ribose (cADPR). This molecule binds a second Thoeris protein called ThsA, which becomes activated. In some embodiments, ThsA depletes the cell of nicotinamide adenine dinucleotide (NAD⁺) when active, thus causing abortive infection²⁸. In other embodiments, ThsA is a membrane-spanning effector that depolarizes the membrane when it becomes active. It was found that phage SBSphiJ7, which overcomes Thoeris defense (FIG. 1C), encodes six unique genes that did not appear in any of the phages blocked by Thoeris (Table 5 hereinbelow). Each of these six genes was cloned, under the control of an inducible promoter, into B. subtilis cells that also express the Thoeris system from Bacillus cereus MSX-D12. One of these genes, referred to herein as “TAD1 (Thoeris Anti Defense 1)” robustly inhibited the activity of the Thoeris defense system, as phages that were normally blocked by Thoeris were able to infect Thoeris-expressing cells if they also expressed TAD1 (FIGS. 2A-B). Further, silencing the expression of TAD1 in SBSphiJ7 using dCAS9³⁷ caused SBSphiJ7 to be blocked by Thoeris, verifying that TAD1 is the gene responsible for the Thoeris inhibiting phenotype of SBSphiJ7 (FIG. 2C). Moreover, knock-in of TAD1 into phage SBSphiJ, which does not naturally encode this gene, rendered the phage fully resistant to Thoeris, showing that TAD1 alone confers the anti-Thoeris phenotype (FIG. 2B).

[0371] The identified TAD1 is a small protein (142 aa) of unknown function, with no recognizable protein domain. A search based on sequence homology identified over 750 TAD1 homologs in the integrated microbial genomes (IMG)³⁸ and the metagenomic gut virus (MGV)³⁹ databases (Table 6-7 hereinabove). Strikingly, all homologs of TAD1 resided either in phage genomes or in genomes of prophages integrated within bacterial genomes, indicating that this protein primarily executes a phage function. The discovered TAD1-encoding phages belong to multiple phage families, including Myoviridae, Podoviridae and Siphoviridae, and infect at least 60 species of bacteria from a diverse set of taxonomic phyla including Proteobacteria, Firmicutes and Cyanobacteria (FIG. 2D).

[0372] A phylogenetic analysis based on 256 unique TAD1 sequences showed that TAD1 proteins can be divided into four major clades (FIG. 2D). In some cases, phages encoding similar TAD1 proteins that were placed on the same phylogenetic clade belonged to different phage families, suggesting that TAD1 genes can be horizontally transferred between phages (FIG. 2D).

[0373] In the next step, 10 TAD1 homologs that span the phylogenetic diversity of the TAD1 family were selected, and each of them was cloned into Bacillus subtilis cells that express the Thoeris system from Bacillus cereus MSX-D12 (FIG. 2D). All 10 TAD1 family proteins were able to inhibit Thoeris, including homologs derived from phages that infect distant organisms such as Leptolyngbya sp., Opitutaceae sp. and Acinetobacter baumannii (FIGS. 2D-E and 11A-B). Combined together, these results reveal a large family of proteins utilized by phages to inhibit the activity of the Thoeris bacterial defense system.

[0374] The mechanism of action of the Thoeris defense system was recently described in detail²⁸, opening a path to examine how TAD1 inhibits Thoeris. As most of the known anti-CRISPR proteins function by directly binding and inhibiting key proteins on the CRISPR-Cas complex, it was initially anticipated that TAD1 will bind one of the two Thoeris proteins, ThsA or ThsB. However, TAD1 did not co-immunoprecipitate with either ThsA or ThsB, implying that TAD1 inhibits Thoeris via a mechanism that does not require physical interaction with Thoeris proteins (FIG. 13). The hallmark of Thoeris defense system are TIR-domain proteins which produce the cADPR isomer signaling molecule that triggers the NADase activity of the Thoeris ThsA protein once they sense the infection²⁸. To test if this signaling molecule is produced in the presence of TAD1, cells expressing a Thoeris system from Bacillus cereus MSX-D12 in which ThsA was mutated in its NADase active site were used. These cells were infected by phage SBSphiJ, followed by lysis of the cells and filtration of the lysates to include only molecules smaller than 3 kDa. As expected, purified ThsA protein incubated with these lysates in vitro became a strong NADase, indicating that the TIR-domain ThsB protein produced the signaling molecule within the cell in response to SBSphiJ infection (FIG. 4A). However, lysates derived from cells in which TAD1 was co-expressed with the Thoeris system failed to activate ThsA in vitro, suggesting that the signaling molecule is not produced in Thoeris-infected cells that express TAD1 (FIG. 4A). Liquid chromatography followed by tandem mass spectrometry (LC-MSMS) confirmed that the signaling molecule was present in lysates of infected cells expressing ThsB, but absent in lysates derived from infected cells where ThsB was co-expressed with TAD1 (FIG. 4B). These results indicate that TAD1 works upstream of ThsA.

[0375] Next, the inventors experimented with a purified TAD1 homolog from Clostridioides mangenotii (SEQ ID NO: 269 (NA)/337 (AA)). To test if TAD1 can eliminate the signaling molecule from the lysate, 3 kDa filtered lysates were collected from cells expressing ThsB that were infected by phage SBSphiJ, and the filtrates were incubated with TAD1 for 10 minutes. Lysates incubated with TAD1 completely lost their ability to induce ThsA, demonstrating that TAD1 rapidly eliminates the signaling molecule from the lysate rather than inhibiting its production (FIG. 4C).

[0376] To examine if TAD1 is an enzyme or a chelator (a “sponge”) that strongly binds and sequesters the signaling v-cADPR molecule, the inventors set out to test whether, following the chelation, TAD1 denaturation could release the bound signaling molecule. To this end, TAD1 was first incubated with the signal-containing lysate for 10 minutes, and then denatured by exposure to 85° C. for 5 minutes. Following re-filtering of the medium it was found that this medium robustly activated ThsA in vitro (FIG. 4D). These results demonstrate that TAD1 binds and sequesters, but does not degrade, the Thoeris signaling molecule. Without being bound by theory, these results point to a mechanistic model in which TAD1 inhibits Thoeris defense by physically binding and sequestering the TIR-derived signaling molecule (cADPR isomer), thus preventing the activation of the Thoeris immune effector and mitigating Thoeris-mediated premature cell death.

### Example 3

### Had1 as an Anti-Hachiman Gene

[0377] The Hachiman defense system is widely distributed in genomes of bacterial and archaeal species, and was shown to protect against a broad range of phages¹⁹. The system encodes a protein with a predicted helicase domain, as well as an additional protein of unknown function.

[0378] Three short genes of unknown function that were unique to phage SBSphiJ4, a phage that overcame Hachiman-mediated defense (FIG. 1C, Table 5 hereinbelow), were cloned into a B. subtilis strain that expresses the Hachiman system from B. cereus B4087¹⁹. One of these genes, referred to herein as “HAD1 (Hachiman Anti Defense 1)”, completely abolished Hachiman-mediated defense (FIGS. 3A-B). Further, silencing of HAD1 expression in SBSphiJ4 resulted in a phage that could infect control strains, but was blocked by Hachiman defense, supporting that HAD1 is responsible for the anti-Hachiman phenotype (FIG. 3C).

[0379] HAD1 is a short protein of 53aa, which does not show sequence homology to any protein of known function. 23 homologs of HAD1 were found in Bacillus phages as well as prophages integrated within Bacillus and Paenibacillus genomes (Table 8 hereinabove). Five homologs that span the protein sequence diversity of HAD1 were selected for further experimental examination (FIG. 12A). Four of these proteins efficiently inhibited the activity of Hachiman, and the fifth could not be cloned into Hachiman-expressing cells (FIGS. 3D and 12B). These results confirm that HAD1 is a Hachiman-inhibiting family of phage proteins.

### Example 4

### Gad1 as an Anti-Gabija Gene

[0380] The Gabija defense system is widely distributed in genomes of bacterial and archaeal species, and was shown to protect against a broad range of phages¹⁹. The system encodes a protein with a predicted helicase domain, as well as an additional protein of unknown function.

[0381] The Gabija defense system from B. cereus VD045 cloned within B. subtilis provided strong protection against some phages of the SpBeta group including SpBeta and SpBetaL8, and intermediate, weaker defense against phages SpBetaL6 and SpBetaL7 (FIG. 1C). The remaining seven phages of the SpBeta group were able to overcome Gabija-mediated defense. Two genes that were present in the seven Gabija-overcoming phages were missing from phages that could not overcome Gabija defense (FIGS. 3E and 9; and Table 5 hereinbelow). One of these genes, referred to herein as “GAD1 (Gabija Anti Defense 1)” could not be cloned into Gabija-expressing cells, and the second gene did not show a Gabija-inhibiting phenotype when co-expressed with Gabija. To examine the possible function of GAD1, the inventors took advantage of the fact that SpBeta-like phages are temperate phages that can be genetically manipulated when integrated into the bacterial genome, and knocked out the GAD1 gene from the genome of phage phi3T. The results show that phi3T knocked out for GAD1 was no longer able to overcome Gabija defense, suggesting that this gene inhibits Gabija (FIG. 3F).

[0382] GAD1 is a 295aa-long protein that does not show direct sequence similarity to proteins of known function. 94 homologs of GAD1, which were distributed in genomes of various phages and prophages infecting host bacteria from the phyla Proteobacteria and Firmicutes were found (FIG. 3G, Tables 9-10 hereinabove). Interestingly, many of the GAD1-contaning prophages were integrated in bacterial genomes that also encoded the Gabija system, suggesting that GAD1 enabled these phages to overcome Gabija-mediated defense of their hosts (FIG. 3G). Five GAD1 homologs from phages infecting Shewanella sp., Enterobacter roggenkampii, Escherichia coli, Brevibacillus gelatini and Bacillus xiamenensis were selected for further experimental examination (FIGS. 3G and 12C).

[0383] These selected GAD1 homologs were successfully cloned to Gabija-containing cells, and all five genes efficiently inhibited the Gabija defense system (FIG. 12D).

### Example 5

### Dsad1 as an Anti-Dsr2 Gene

[0384] SIR2-domain proteins, or sirtiuins, are found in organisms ranging from bacteria to humans. These proteins have been widely studied in yeast and mammals, where they were shown to regulate transcription repression, recornbination, DNA repair and cell cycle processes¹, In eukaryotes, SIR2 domains were shown to possess enzymatic activities, and function either as protein deacetylases or ADP ribosyltransferases (Yuan, H. and Marmorstein, R. (2012) J. Biol. Chem., 287, 42428-42435). In bacteria, SIR2 domains were described as commonly taking part in defense systems that protect against phages (Gao, L., et al. (2020) Science, 369, 1077-1084). These domains are associated with multiple different defense systems, including prokaryotic argonautes (pAgo) (Swarts, D. C., et al. (2014) Nat. Struct. Mol. Biol., 21, 743-753), Thoeris (Doron, S., et al. (2018) Science (80-.), 359, eaar4120; Ofir, G., et al. (2021) bioRxiv, 10.1101/2021.01.06.425286), AVAST (Gao, L., et al. (2020) Science, 369, 1077-1084), DSR (Gao, L., et al. (2020) Science, 369, 1077-1084) and additional systems. The SIR2 domain in the Thoeris defense system was shown to be an NADase responsible for depleting NAD⁺ from the cell once phage infection has been sensed (Ofir, G., et al. (2021) bioRxiv, 10.1101/2021.01.06.425286). However, it is currently unknown whether SIR2 domains in other defense systems perform a similar function, or whether they have other roles in phage defense.

[0385] To study the role of SIR2 domains in bacterial defense, the inventors focused on DSR2, a minimal defense system that includes a single protein with an N-terminal SIR2 domain and no additional identifiable domains (FIG. 5A). To this end, the DSR2 gene from Bacillus subtilis 29R (SEQ ID NO: 746) together with its native promoter was cloned into the genome of B. subtilis BEST7003 which naturally lacks this gene, and found that DSR2 protected B. subtilis against SPR (FIG. 5B). Point mutations predicted to inactivate the active site of the SIR2 domain (N133A and H171A) abolished defense, suggesting that the enzymatic activity of SIR2 is essential for DSR2 defense (FIG. 5B). Following, the inventors tested whether DSR2 defends via abortive infection, a process that involves premature death or growth arrest of the infected cell, preventing phage replication and spread to nearby cells (Lopatina, A., Tal, N. and Sorek, R. (2020) Annu. Rev. Virol., 7(1):371-384). When infected in liquid media, DSR2-containing bacterial cultures demised if the culture was infected by phage in high multiplicity of infection (MOI), similar to DSR2-lacking cells (FIG. 5C). In low MOI infection, DSR2-lacking control cultures collapsed but DSR-containing bacteria survived (FIG. 5C). This phenotype is a hallmark of abortive infection, in which infected bacteria do not survive but also do not produce phage progeny. To test whether DSR2 manipulates the NAD⁺ content in the cell during phage infection, mass spectrometry was used to monitor NAD⁺ levels in infected cells at various time points following initial infection. When DSR2-containing cells were infected by phage, cellular NAD⁺ sharply decreased between 20 and 30 minutes from the onset of infection (FIG. 5D). NAD⁺ levels were not changed in cells in which the SIR2 active site was mutated, or in DSR2-lacking control cells, suggesting that the SIR2 domain is responsible to the observed NAD⁺ depletion (FIG. 5D). In parallel with NAD⁺ depletion, accumulation of ADP-ribose (ADPR), the product of NAD⁺ cleavage, was observed (FIG. 5E). These results demonstrate that DSR2 is an abortive infection protein that causes NAD⁺ depletion in infected cells.

[0386] The DSR2 defense system strongly protected B. subtilis cells against SPR, a phage belonging the SPBeta group of phages (FIG. 5B). However, the defense gene failed to protect against phages phi3T and SPBeta, although both these phages also belong to the SPBeta group (FIG. 5B). This observation suggests that phages phi3T and SpBeta either encode genes that inhibit DSR2, or lack genes that are recognized by DSR2 and trigger its NADase activity. SPR, phi3T and SPbeta all share substantial genomic regions with high sequence homology (FIG. 6A). It was therefore reasoned that co-infecting cells with SPR and phi3T may result in recombination-mediated genetic exchange between the phages, which would enable pinpointing genes that allow escape from DSR2 defense when acquired by SPR (FIG. 6B).

[0387] To generate a bacterial host that would select for such genetic exchange events, a prokaryotic viperin homolog (pVip) from Fibrobacter sp. UWT3 (Bernheim, A., et al. (2021) Nature, 589(7840):120-124) was also cloned into DSR2-containing cells. This pVip protein, when expressed alone in B. subtilis, protected it from phi3T and SpBeta but not from SPR, a defense profile which is opposite to the DSR2 profile in terms of the affected phages (FIG. 7). Accordingly, none of the three SPBeta-group phages could form plaques on the strain that expressed both defensive genes. However, when simultaneously infecting the double defense strain with SPR and phi3T or SpBeta, plaque forming hybrids were readily obtained, indicating that these hybrid phages recombined and have acquired a combination of genes enabling them to escape both DSR2 and pVip (FIG. 6C).

[0388] Following, 16 such hybrid phages were isolated and sequenced, their genomes assembled, and these genomes were compared to the genome of the parent SPR phage (FIG. 6D). This led to the identification of two genomic segments that were repeatedly acquired by SPR phages. Acquisition of either of these segments from a genome of a co-infecting phage rendered SPR resistant to DSR2 (FIG. 6D). The first segment included several small genes of unknown function that are present in phages phi3T and SPBeta but not in the wild type SPR phage. Hence, these genes ability to inhibit DSR2 was tested. One of the genes (SEQ ID NO: 738), referred to herein as “DSAD1 (DSR Anti Defense 1)”, when co-expressed with DSR2 in the same cell, rendered DSR2 inactive, suggesting that this phage gene encodes an anti-DSR2 protein (FIG. 8A). The anti-DSR2 gene encodes a 120aa protein (SEQ ID NO: 739), with no identifiable homology to proteins of known function. Co-expression of DSR2 and tagged DSAD1, followed by pulldowns, showed direct interaction between the two proteins (FIG. 8B). These results indicate DSAD1 is a phage protein that binds and inhibits DSR2.

[0389] Following, the second genomic segment that, when acquired, allowed phage hybrids to escape DSR2 was examined. In the parent SPR phage, this region spans a set of genes encoding phage structural proteins. Hybrid phages in which the original genes were replaced by their homologs from SpBeta or phi3T become resistant to DSR2 (FIG. 6D). It was hypothesized that one of the structural proteins in phage SPR is recognized by DSR2 to activate its defense, and when this protein is replaced by its homolog from another phage, recognition no longer occurs. To test this hypothesis, each of the structural genes found in the original DNA segment in SPR was cloned into B. subtilis cells that also express DSR2. One of these genes, encoding a tail-tube protein, failed to clone into DSR2-expressing cells but was readily cloned into cells in which the DSR2 active site was mutated (FIG. 8C). To further test if co-expression of DSR2 and the SPR tail tube protein is toxic to bacteria, each of these genes was cloned under an inducible promoter within E. coli cells. Indeed, growth was rapidly arrested in cells in which the expression of both genes was induced (FIG. 8D), and these cells became depleted of NAD+(FIG. 8E-F). Furthermore, pulldown assays showed that DSR2 directly binds the tail tube protein of phage SPR (FIG. 8B). Without being bound by theory, these results demonstrate that the tail tube protein of phage SPR is directly recognized by the defense protein DSR2, and that this recognition triggers the NADase activity of DSR2 and results in growth arrest (FIG. 8G).

### Example 6

### Tad2 as an Anti-Thoeris Gene

[0390] The Thoeris anti-phage system provides strong defense against phages SPO1L1, SPO1L2, SPO1L4 and SPO1L5, while the genomically-similar phages SPO1 and SPO1L3 partially escape Thoeris mediated defense (FIG. 14A). One gene was identified as unique to phages SPO1 and SPO1L3 [SEQ ID NO: 757 (NA)/1046 (AA)]. To test if this gene is a novel Thoeris inhibitor, it was cloned under the control of an inducible promoter into B. subtilis cells that also express the Thoeris system from Bacillus cereus MSX-D12 [SEQ ID NO: 741 (NA)/1296-1297 (AA)]. Indeed, this gene, referred to herein as “TAD2 (Thoeris Anti Defense 2)”, robustly inhibited the activity of Thoeris, as phages that were normally blocked by Thoeris were able to infect Thoeris-expressing cells if these cells also expressed TAD2 (FIG. 14A). Further, silencing the expression of TAD2 in SPO1 using dCas9³⁷ caused SPO1 to be blocked by Thoeris, verifying that TAD2 is the gene responsible for the Thoeris-inhibiting phenotype of SPO1 (FIG. 14B).

[0391] Following, 250 unique homologs of TAD2, which were distributed in genomes of various phages and prophages infecting host bacteria from 6 different phyla were found (FIG. 15, Tables 11-12 hereinabove).

[0392] In the next step, four TAD2 homologs from phages infecting Escherichia coli, Ruminococcus callidus, Maridesulfovibrio bastinii and Nitrosospira sp. cloned under an inducible promoter into cells expressing the Thoeris defense system from Bacillus cereus MSX-D12 [SEQ ID NO: 741 (NA)/1296-1297 (AA)] efficiently inhibited the Thoeris defense system (FIG. 16). Other TAD2 homologs efficiently inhibited the Thoeris defense systems from Bacillus amyloliquefaciens Y2 [SEQ ID NO: 1300 (NA)/1301-1302 (AA)] (FIG. 18).

[0393] To examine if TAD2 is also a chelator (a “sponge”) that strongly binds and sequesters the TIR-derived molecule, the present inventors tested whether, following the chelation, TAD2 denaturation could release the bound signaling molecule. To this end, TAD2 was first incubated with the TIR-derived signal (1″-3′gcADPR) for 10 minutes, and then denatured by exposure to 95° C. for 5 minutes. Following re-filtering of the medium it was found that this medium robustly activated ThsA in vitro (FIG. 17). These results demonstrate that similarly to TAD1, TAD2 binds and sequesters the Thoeris signaling molecule, thus decoupling phage sensing and immune effector activation and rendering Thoeris inactive.

TABLE 1
SBSphiJ % genome overlap

| | Query | | | | | | | |
|---|---|---|---|---|---|---|---|---|
| Target | SBSphiJ3 | SBSphiJ6 | SBSphiJ2 | SBSphiJ | SBSphiJ4 | SBSphiJ1 | SBSphiJ5 | SBSphiJ7 |
| SBSphiJ3 | 100 | 94 | 97 | 98 | 91 | 94 | 91 | 92 |
| SBSphiJ6 | 95 | 100 | 95 | 95 | 94 | 96 | 91 | 92 |
| SBSphiJ2 | 96 | 92 | 100 | 97 | 90 | 93 | 90 | 90 |
| SBSphiJ | 96 | 93 | 97 | 100 | 92 | 93 | 91 | 92 |
| SBSphiJ4 | 92 | 94 | 92 | 93 | 100 | 93 | 89 | 92 |
| SBSphiJ1 | 95 | 96 | 95 | 94 | 92 | 100 | 92 | 93 |
| SBSphiJ5 | 92 | 91 | 92 | 92 | 89 | 92 | 100 | 92 |
| SBSphiJ7 | 93 | 92 | 93 | 94 | 92 | 94 | 93 | 100 |

TABLE 2
SBSphiJ sequence identity

| | SBSphiJ3 | SBSphiJ6 | SBSphiJ2 | SBSphiJ | SBSphiJ4 | SBSphiJ1 | SBSphiJ5 | SBSphiJ7 |
|---|---|---|---|---|---|---|---|---|
| SBSphiJ3 | 100 | 99.3 | 98.9 | 98.1 | 97.6 | 98.7 | 97.1 | 97.9 |
| SBSphiJ6 | | 100 | 99.5 | 98.3 | 96.5 | 98.8 | 97.3 | 95.9 |
| SBSphi.J2 | | | 100 | 99.4 | 98.1 | 98.9 | 96.7 | 98 |
| SBSphiJ | | | | 100 | 97.9 | 98.2 | 96.7 | 94.2 |
| SBSphiJ4 | | | | | 100 | 96.7 | 96.7 | 97.2 |
| SBSphiJ1 | | | | | | 100 | 96.7 | 96.2 |
| SBSphiJ5 | | | | | | | 100 | 95.3 |
| SBSphiJ7 | | | | | | | | 100 |

TABLE 3
SpBeta % genome overlap

| | Query | | | | | | | | | | |
|---|---|---|---|---|---|---|---|---|---|---|---|
| Target | SpBetaL2 | SPR | SpBetaL3 | SpBetaL8 | SpBetaL7 | SpBetaL6 | SpBeta | phi3T | SpBetaL1 | SpBetaL4 | SpBetaL5 |
| SpBetaL2 | 100 | 81 | 66 | 57 | 52 | 53 | 55 | 46 | 55 | 54 | 45 |
| SPR | 83 | 100 | 64 | 57 | 52 | 51 | 54 | 45 | 54 | 52 | 48 |
| SpBetaL3 | 67 | 63 | 100 | 50 | 45 | 46 | 44 | 62 | 49 | 45 | 60 |
| SpBetaL8 | 60 | 58 | 52 | 100 | 70 | 69 | 65 | 61 | 68 | 69 | 60 |
| SpBetaL7 | 53 | 52 | 46 | 68 | 100 | 96 | 66 | 53 | 66 | 77 | 57 |
| SpBetaL6 | 54 | 51 | 46 | 67 | 96 | 100 | 66 | 53 | 69 | 82 | 54 |
| SpBeta | 55 | 53 | 43 | 62 | 64 | 65 | 100 | 58 | 60 | 67 | 49 |
| phi3T | 48 | 46 | 64 | 60 | 54 | 55 | 61 | 100 | 56 | 55 | 69 |
| SpBetaL1 | 55 | 54 | 49 | 65 | 64 | 67 | 61 | 53 | 100 | 67 | 55 |
| SpBetaL4 | 56 | 53 | 46 | 68 | 79 | 83 | 70 | 54 | 69 | 100 | 52 |
| SpBetaL5 | 47 | 49 | 62 | 60 | 59 | 56 | 52 | 70 | 58 | 53 | 100 |

TABLE 4
SpBeta sequence identity

| | SpBetaL2 | SPR | SpBetaL3 | SpBetaL8 | SpBetaL7 | SpBetaL6 | SpBeta | phi3T | SpBetaL1 | SpBetaL4 | SpBetaL5 |
|---|---|---|---|---|---|---|---|---|---|---|---|
| SpBetaL2 | 100 | 99.7 | 98.1 | 97.7 | 97.4 | 97.4 | 96.9 | 96.9 | 96.5 | 91.7 | 97.9 |
| SPR | | 100 | 98.6 | 97.7 | 97.1 | 97.1 | 97 | 97.1 | 96.4 | 91.5 | 97.7 |
| SpBetaL3 | | | 100 | 97.2 | 96.9 | 96.9 | 97.6 | 99.3 | 97.2 | 90 | 98.1 |
| SpBetaL8 | | | | 100 | 97.2 | 97.2 | 97.5 | 97.5 | 96.6 | 96.6 | 96.3 |
| SpBetaL7 | | | | | 100 | 100 | 96.9 | 96.5 | 96.3 | 93.9 | 97 |
| SpBetaL6 | | | | | | 100 | 96.9 | 96.7 | 97.5 | 99.7 | 98.1 |
| SpBeta | | | | | | | 100 | 99.7 | 96.2 | 96.6 | 97.3 |
| phi3T | | | | | | | | 100 | 96.2 | 96.6 | 98.7 |
| SpBetaL1 | | | | | | | | | 100 | 97.3 | 96 |
| SpBetaL4 | | | | | | | | | | 100 | 96.9 |
| SpBetaL5 | | | | | | | | | | | 100 |

TABLE 5
Candidate anti-defense genes

| | ORF | additional | candidate | verified as | AA | psi-blast functional | DNA sequence | AA sequence |
|---|---|---|---|---|---|---|---|---|
| phage | # | name | for system | anti-defense | length | annotation | SEQ ID NO: | SEQ ID NO: |
| SBSphiJ7 | 74 | | Thoeris | no | 216 | unknown | 1 | 18 |
| SBSphiJ7 | 142 | | Thoeris | no | 65 | unknown | 2 | 19 |
| SBSphiJ7 | 146 | | Thoeris | no | 67 | unknown | 3 | 20 |
| SBSphiJ7 | 155 | | Thoeris | no | 708 | DNA polymerase | 4 | 21 |
| SBSphiJ7 | 158 | TAD1 | Thoeris | yes | 142 | unknown | 5 | 22 |
| SBSphiJ7 | 204 | | Thoeris | no | 237 | HNH endonuclease | 6 | 23 |
| SBSphiJ4 | 27 | | Hachiman | no | 79 | Minor tail protein | 7 | 24 |
| SBSphiJ4 | 28 | | Hachiman | no | 54 | unknown | 8 | 25 |
| SBSphiJ4 | 156 | | Hachiman | no | 100 | DNA polymerase | 9 | 26 |
| SBSphiJ4 | 157 | | Hachiman | no | 230 | HNH endonuclease | 10 | 27 |
| SBSphiJ4 | 158 | | Hachiman | no | 219 | DNA polymerase | 11 | 28 |
| SBSphiJ4 | 181 | | Hachiman | no | 44 | RNA polymerase | 12 | 29 |
| SBSphiJ4 | 194 | | Hachiman | no | 37 | PKHD-type hydroxylase | 13 | 30 |
| SBSphiJ4 | 232 | | Hachiman | no | 146 | unknown | 14 | 31 |
| SBSphiJ4 | 243 | HAD1 | Hachiman | yes | 53 | unknown | 15 | 32 |
| Phi3T | 158 | GAD1 | Gabija | yes | 295 | unknown | 16 | 33 |
| Phi3T | 159 | | Gabija | no | 90 | unknown | 17 | 34 |

[0394] Although the invention has been described in conjunction with specific embodiments thereof, it is evident that many alternatives, modifications and variations will be apparent to those skilled in the art. Accordingly, it is intended to embrace all such alternatives, modifications and variations that fall within the spirit and broad scope of the appended claims.

[0395] All publications, patents and patent applications mentioned in this specification are herein incorporated in their entirety by reference into the specification, to the same extent as if each individual publication, patent or patent application was specifically and individually indicated to be incorporated herein by reference. In addition, citation or identification of any reference in this application shall not be construed as an admission that such reference is available as prior art to the present invention. To the extent that section headings are used, they should not be construed as necessarily limiting. In addition, any priority document(s) of this application is/are hereby incorporated herein by reference in its/their entirety.

### REFERENCES

### (Other References are Cited Throughout the Application)

[0396] 1. Labrie, S. J., Samson, J. E. & Moineau, S. Bacteriophage resistance mechanisms. Nat. Rev. Microbiol. 8, 317-327 (2010).
[0397] 2. Stem, A. & Sorek, R. The phage-host arms race: Shaping the evolution of microbes. BioEssays 33, 43-51 (2011).
[0398] 3. Dy, R. L., Richter, C., Salmond, G. P. C. & Fineran, P. C. Remarkable Mechanisms in Microbes to Resist Phage Infections. Annu. Rev. Virol. 1, 307-331 (2014).
[0399] 4. Samson, J. E., Magadin, A. H., Sabri, M. & Moineau, S. Revenge of the phages: defeating bacterial defences. Nat. Rev. Microbiol. 11, 675-687 (2013).
[0400] 5. Ofir, G. & Sorek, R. Contemporary Phage Biology: From Classic Models to New Insights. Cell 172, 1260-1270 (2018).
[0401] 6. Atanasiu, C. Interaction of the ocr gene 0.3 protein of bacteriophage T7 with EcoKI restriction/modification enzyme. Nucleic Acids Res. 30, 3936-3944 (2002).
[0402] 7. Walkinshaw, M. et al. Structure of Ocr from Bacteriophage T7, a Protein that Mimics B-Form DNA. Mol. Cell 9, 187-194 (2002).
[0403] 8. Iida, S., Streiff, M. B., Bickle, T. A. & Arber, W. Two DNA antirestriction systems of bacteriophage P1, darA, and darB: characterization of darA- phages. Virology 157, 156-166 (1987).
[0404] 9. Drozdz, M., Piekarowicz, A., Bujnicki, J. M. & Radlinska, M. Novel non-specific DNA adenine methyltransferases. Nucleic Acids Res. 40, 2119-2130 (2012).
[0405] 10. Studier, F. W. & Movva, N. R. SAMase gene of bacteriophage T3 is responsible for overcoming host restriction. J. Virol. 19, 136-145 (1976).
[0406] 11. Thavalingam, A. et al. Inhibition of CRISPR-Cas9 ribonucleoprotein complex assembly by anti-CRISPR AcrIIC2. Nat. Commun. 10, 2806 (2019).
[0407] 12. Lu, W.-T., Trost, C. N., Müller-Esparza, H., Randau, L. & Davidson, A. R. Anti-CRISPR AcrIF9 functions by inducing the CRISPR-Cas complex to bind DNA non-specifically. Nucleic Acids Res. 49, 3381-3393 (2021).
[0408] 13. Bondy-Denomy, J. et al. Multiple mechanisms for CRISPR-Cas inhibition by anti-CRISPR proteins. Nature 526, 136-139 (2015).
[0409] 14. Stanley, S. Y. & Maxwell, K. L. Phage-Encoded Anti-CRISPR Defenses. Annu. Rev. Genet. 52, 445-464 (2018).
[0410] 15. Li, Y. & Bondy-Denomy, J. Anti-CRISPRs go viral: The infection biology of CRISPR-Cas inhibitors. Cell Host Microbe 29, 704-714 (2021).
[0411] 16. Jia, N. & Patel, D. J. Structure-based functional mechanisms and biotechnology applications of anti-CRISPR proteins. Nat. Rev. Mol. Cell Biol. 22, 563-579 (2021).
[0412] 17. Otsuka, Y. & Yonesaki, T. Dmd of bacteriophage T4 functions as an antitoxin against Escherichia coli LsoA and RnlA toxins. Mol. Microbiol. 83, 669-681 (2012).
[0413] 18. Blower, T. R., Evans, T. J., Przybilski, R., Fineran, P. C. & Salmond, G. P. C. Viral Evasion of a Bacterial Suicide System by RNA-Based Molecular Mimicry Enables Infectious Altruism. PLoS Genet. 8, e1003023 (2012).
[0414] 19. Doron, S. et al. Systematic discovery of antiphage defense systems in the microbial pangenome. Science (80-.). 359, eaar4120 (2018).
[0415] 20. Gao, L. et al. Diverse enzymatic activities mediate antiviral immunity in prokaryotes. Science (80-.). 369, 1077-1084 (2020).
[0416] 21. Cohen, D. et al. Cyclic GMP-AMP signalling protects bacteria against viral infection. Nature 574, 691-695 (2019).
[0417] 22. Millman, A. et al. Bacterial Retrons Function In Anti-Phage Defense. Cell 183, 1551-1561.e12 (2020).
[0418] 23. Bernheim, A. et al. Prokaryotic viperins produce diverse antiviral molecules. Nature 589, 120-124 (2021).
[0419] 24. Bernheim, A. & Sorek, R. The pan-immune system of bacteria: antiviral defence as a community resource. Nat. Rev. Microbiol. 18, 113-119 (2020).
[0420] 25. Whiteley, A. T. et al. Bacterial cGAS-like enzymes synthesize diverse nucleotide signals. Nature 567, 194-199 (2019).
[0421] 26. Lau, R. K. et al. Structure and Mechanism of a Cyclic Trinucleotide-Activated Bacterial Endonuclease Mediating Bacteriophage Immunity. Mol. Cell 77, 723-733.e6 (2020).
[0422] 27. Millman, A., Melamed, S., Amitai, G. & Sorek, R. Diversity and classification of cyclic-oligonucleotide-based anti-phage signalling systems. Nat. Microbiol. 5, 1608-1615 (2020).
[0423] 28. Ofir, G. et al. Antiviral activity of bacterial TIR domains via signaling molecules that trigger cell death. bioRxiv 2021.01.06.425286 (2021) doi:10.1101/2021.01.06.425286.
[0424] 29. Kronheim, S. et al. A chemical defence against phage infection. Nature 564, 283-286 (2018).
[0425] 30. Bobonis, J. et al. Phage proteins block and trigger retron toxin/antitoxin systems. bioRxiv 2020.06.22.160242 (2020) doi:10.1101/2020.06.22.160242.
[0426] 31. Bondy-Denomy, J., Pawluk, A., Maxwell, K. L. & Davidson, A. R. Bacteriophage genes that inactivate the CRISPR/Cas bacterial immune system. Nature 493, 429-432 (2013).
[0427] 32. Pawluk, A., Bondy-Denomy, J., Cheung, V. H. W., Maxwell, K. L. & Davidson, A. R. A New Group of Phage Anti-CRISPR Genes Inhibits the Type I-E CRISPR-Cas System of Pseudomonas aeruginosa. MBio 5, (2014).
[0428] 33. Rauch, B. J. et al. Inhibition of CRISPR-Cas9 with Bacteriophage Proteins. Cell 168, 150-158.e10 (2017).
[0429] 34. Warner, F. D., Kitos, G. A., Romano, M. P. & Hemphill, H. E. Characterization of SPP: a temperate bacteriophage from Bacillus subtilis 168M. Can. J. Microbiol. 23, 45-51 (1977).
[0430] 35. Tucker, R. G. Acquisition of Thymidylate Synthetase Activity by a Thymine-requiring Mutant of Bacillus subtilis following Infection by the Temperate Phage 3. J. Gen. Virol. 4, 489-504 (1969).
[0431] 36. Noyer-Weidner, M., Jentsch, S., Pawlek, B., Günthert, U. & Trautner, T. A. Restriction and modification in Bacillus subtilis: DNA methylation potential of the related bacteriophages Z, SPR, SP beta, phi 3T, and rho 11. J. Virol. 46, 446-453 (1983).
[0432] 37. Bikard, D. et al. Programmable repression and activation of bacterial gene expression using an engineered CRISPR-Cas system. Nucleic Acids Res. 41, 7429-7437 (2013).
[0433] 38. Chen, I.-M. A. et al. IMG/M v.5.0: an integrated data management and comparative analysis system for microbial genomes and microbiomes. Nucleic Acids Res. 47, D666-D677 (2019).
[0434] 39. Nayfach, S. et al. Metagenomic compendium of 189,680 DNA viruses from the human gut microbiome. Nat. Microbiol. 6, 960-970 (2021).
[0435] 40. Bacteriophages. vol. 501 (Humana Press, 2009).
[0436] 41. Mazzocco, A., Waddell, T. E., Lingohr, E. & Johnson, R. P. Enumeration of Bacteriophages Using the Small Drop Plaque Assay System. in 81-85 (2009). doi:10.1007/978-1-60327-164-6_9.
[0437] 42. Baym, M. et al. Inexpensive Multiplexed Library Preparation for Megabase-Sized Genomes. PLoS One 10, e0128036 (2015).
[0438] 43. Lee, T. S. et al. BglBrick vectors and datasheets: A synthetic biology platform for gene expression. J. Biol. Eng. 5, 12 (2011).
[0439] 44. Martin, M. Cutadapt removes adapter sequences from high-throughput sequencing reads. EMBnet.journal 17, 10 (2011).
[0440] 45. Nurk, S. et al. Assembling Genomes and Mini-metagenomes from Highly Chimeric Reads. in 158-170 (2013). doi:10.1007/978-3-642-37195-0_13.
[0441] 46. Hyatt, D. et al. Prodigal: prokaryotic gene recognition and translation initiation site identification. BMC Bioinformatics 11, 119 (2010).
[0442] 47. Steinegger, M. & Söding, J. MMseqs2 enables sensitive protein sequence searching for the analysis of massive data sets. Nat. Biotechnol. 35, 1026-1028 (2017).
[0443] 48. Katoh, K. & Standley, D. M. MAFFT Multiple Sequence Alignment Software Version 7: Improvements in Performance and Usability. Mol. Biol. Evol. 30, 772-780 (2013).
[0444] 49. Nguyen, L.-T., Schmidt, H. A., von Haeseler, A. & Minh, B. Q. IQ-TREE: A Fast and Effective Stochastic Algorithm for Estimating Maximum-Likelihood Phylogenies. Mol. Biol. Evol. 32, 268-274 (2015).
[0445] 50. Letunic, I. & Bork, P. Interactive Tree Of Life (iTOL) v5: an online tool for phylogenetic tree display and annotation. Nucleic Acids Res. 49, W293-W296 (2021).

1. A genetically modified phage comprising a polynucleotide encoding an anti-defense system polypeptide selected from the group consisting of:
(i) a TAD1 polypeptide having at least 80% identity and/or an e-value≤0.05 to an amino acid sequence selected from the group consisting of SEQ ID NO: 22 and 323-577, and wherein expression of said TAD1 polypeptide in a B. subtilis BEST7003 comprising SEQ ID NO: 741 increases sensitivity of said B. subtilis BEST7003 to infection by at least one B. subtilis phage selected from the group consisting of SBSphiJ, SBSphiJ1, SBSphiJ2, SBSphiJ3, SBSphiJ4, SBSphiJ5 and SBSphiJ6;
(ii) a HAD1 polypeptide having at least 80% identity and/or an e-value≤0.05 to an amino acid sequence selected from the group consisting of SEQ ID NO: 32 and 595-610, and wherein expression of said HAD1 polypeptide in a B. subtilis BEST7003 comprising SEQ ID NO: 742 increases sensitivity of said B. subtilis BEST7003 to infection by at least one B. subtilis phage selected from the group consisting of SBSphiJ, SBSphiJ1, SBSphiJ2, SBSphiJ3, SBSphiJ5, SBSphiJ6 and SBSphiJ7;
(iii) a GAD1 polypeptide having at least 80% identity and/or an e-value≤0.05 to an amino acid sequence selected from the group consisting of SEQ ID NO: 33 and 675-737, and wherein expression of said GAD1 polypeptide in a B. subtilis BEST7003 comprising SEQ ID NO: 740 increases sensitivity of said B. subtilis BEST7003 to infection by at least one B. subtilis phage selected from the group consisting of SpBeta, SpBetaL6, SpBetaL7, SpBetaL8;
(iv) a DSAD1 polypeptide having at least 80% identity and/or an e-value≤0.05 to SEQ ID NO: 739, and wherein expression of said DSAD1 polypeptide in a B. subtilis BEST7003 comprising SEQ ID NO: 746 increases sensitivity of said B. subtilis BEST7003 to infection by a B. subtilis phage SPR; and
(v) a TAD2 polypeptide having at least 80% identity and/or an e-value K 0.05 to an amino acid sequence selected from the group consisting of SEQ ID NO: 1046-1295, and wherein expression of said TAD2 polypeptide in a B. subtilis BEST7003 comprising SEQ ID NO: 741 or 1300 increases sensitivity of said B. subtilis BEST7003 to infection by at least one B. subtilis phage selected from the group consisting of SPO1L1, SPO1L2, SPO1L4 and SPO1L5.

2. (canceled)

3. The genetically modified phage of claim 1, having an increased infectivity to at least one bacteria as compared to a non-genetically modified phage of the same species.

4. The genetically modified phage of claim 1, wherein said polynucleotide is heterologous to said phage.

5. The genetically modified phage of claim 1, wherein said phage comprises genomic segments of a distinct phage integrated in a genome of said phage.

6. A nucleic acid construct comprising a polynucleotide encoding an anti-defense polypeptide selected from the group consisting of:
(i) a TAD1 polypeptide having at least 80% identity and/or an e-value≤0.05 to an amino acid sequence selected from the group consisting of SEQ ID NO: 22 and 323-577, and wherein expression of said TAD1 polypeptide in a B. subtilis BEST7003 comprising SEQ ID NO: 741 increases sensitivity of said B. subtilis BEST7003 to infection by at least one B. subtilis phage selected from the group consisting of SBSphiJ, SBSphiJ1, SBSphiJ2, SBSphiJ3, SBSphiJ4, SBSphiJ5 and SBSphiJ6;
(ii) a HAD1 polypeptide having at least 80% identity and/or an e-value≤0.05 to an amino acid sequence selected from the group consisting of SEQ ID NO: 32 and 595-610, and wherein expression of said HAD1 polypeptide in a B. subtilis BEST7003 comprising SEQ ID NO: 742 increases sensitivity of said B. subtilis BEST7003 to infection by at least one B. subtilis phage selected from the group consisting of SBSphiJ, SBSphiJ1, SBSphiJ2, SBSphiJ3, SBSphiJ5, SBSphiJ6 and SBSphiJ7;
(iii) a GAD1 polypeptide having at least 80% identity and/or an e-value≤0.05 to an amino acid sequence selected from the group consisting of SEQ ID NO: 33 and 675-737, and wherein expression of said GAD1 polypeptide in a B. subtilis BEST7003 comprising SEQ ID NO: 740 increases sensitivity of said B. subtilis BEST7003 to infection by at least one B. subtilis phage selected from the group consisting of SpBeta, SpBetaL6, SpBetaL7, SpBetaL8;
(iv) a DSAD1 polypeptide having at least 80% identity and/or an e-value≤0.05 to SEQ ID NO: 739, and wherein expression of said DSAD1 polypeptide in a B. subtilis BEST7003 comprising SEQ ID NO: 746 increases sensitivity of said B. subtilis BEST7003 to infection by a B. subtilis phage SPR; and
(v) a TAD2 polypeptide having at least 80% identity and/or an e-value≤0.05 to an amino acid sequence selected from the group consisting of SEQ ID NO: 1046-1295, and wherein expression of said TAD2 polypeptide in a B. subtilis BEST7003 comprising SEQ ID NO: 741 or 1300 increases sensitivity of said B. subtilis BEST7003 to infection by at least one B. subtilis phage selected from the group consisting of SPO1L1, SPO1L2, SPO1L4 and SPO1L5;
and a nucleic acid sequence heterologous to said polynucleotide which facilitates expression and/or integration of said polynucleotide in a phage genome.

7. (canceled)

8. The nucleic acid construct of claim 6, wherein said nucleic acid sequence is selected from the group consisting of: a promoter, a recombination element, an element for expression of multiple polynucleotides from a single construct, a transmissible element and a selectable marker.

9. The genetically modified phage of claim 1, wherein said at least 80% is at least 90%.

10. The genetically modified phage of claim 1, wherein said polynucleotide comprises said SEQ ID NO.

11. The genetically modified phage claim 1, wherein:
said amino acid sequence of (i) is selected from the group consisting of SEQ ID NO: 22, 324, 337, 338, 345, 400, 404, 438, 460, 464 and 543;
said amino acid sequence of (ii) is selected from the group consisting of SEQ ID NO: 32, 598, 604, 607 and 609;
said amino acid sequence of (iii) is selected from the group consisting of SEQ ID NO: 33, 689, 723, 725 and 726; and/or
said amino acid sequence of (v) is selected from the group consisting of SEQ ID NO: 1046-1051.

12. (canceled)

13. A method of producing a phage, the method comprising contacting the phage with the nucleic acid construct of claim 6, under conditions which allow integration of said polynucleotide in a genome of said phage, thereby producing the phage.

14. The genetically modified phage claim 1, wherein said phage does not endogenously express said anti-defense system polypeptide.

15. A method of infecting a bacteria, the method comprising contacting the bacteria with the genetically modified phage of claim 1, thereby infecting the bacteria.

16. The method of claim 15, wherein said contacting is effected in-vitro or ex-vivo.

17. The method of claim 15, wherein said contacting is effected in-vivo.

18. A method of treating a bacterial infection in a subject in need thereof, the method comprising administering to the subject a therapeutically effective amount of a phage comprising a polynucleotide encoding an anti-defense system polypeptide selected from the group consisting of:
(i) a TAD1 polypeptide having at least 80% identity and/or an e-value≤0.05 to an amino acid sequence selected from the group consisting of SEQ ID NO: 22 and 323-577, and wherein expression of said TAD1 polypeptide in a B. subtilis BEST7003 comprising SEQ ID NO: 741 increases sensitivity of said B. subtilis BEST7003 to infection by at least one B. subtilis phage selected from the group consisting of SBSphiJ, SBSphiJ1, SBSphiJ2, SBSphiJ3, SBSphiJ4, SBSphiJ5 and SBSphiJ6;
(ii) a HAD1 polypeptide having at least 80% identity and/or an e-value≤0.05 to an amino acid sequence selected from the group consisting of SEQ ID NO: 32 and 595-610, and wherein expression of said HAD1 polypeptide in a B. subtilis BEST7003 comprising SEQ ID NO: 742 increases sensitivity of said B. subtilis BEST7003 to infection by at least one B. subtilis phage selected from the group consisting of SBSphiJ, SBSphiJ1, SBSphiJ2, SBSphiJ3, SBSphiJ5, SBSphiJ6 and SBSphiJ7;
(iii) a GAD1 polypeptide having at least 80% identity and/or an e-value≤0.05 to an amino acid sequence selected from the group consisting of SEQ ID NO: 33 and 675-737, and wherein expression of said GAD1 polypeptide in a B. subtilis BEST7003 comprising SEQ ID NO: 740 increases sensitivity of said B. subtilis BEST7003 to infection by at least one B. subtilis phage selected from the group consisting of SpBeta, SpBetaL6, SpBetaL7, SpBetaL8;
(iv) a DSAD1 polypeptide having at least 80% identity and/or an e-value≤0.05 to SEQ ID NO: 739, and wherein expression of said DSAD1 polypeptide in a B. subtilis BEST7003 comprising SEQ ID NO: 746 increases sensitivity of said B. subtilis BEST7003 to infection by a B. subtilis phage SPR; and
(v) a TAD2 polypeptide having at least 80% identity and/or an e-value K 0.05 to an amino acid sequence selected from the group consisting of SEQ ID NO: 1046-1295, and wherein expression of said TAD2 polypeptide in a B. subtilis BEST7003 comprising SEQ ID NO: 741 or 1300 increases sensitivity of said B. subtilis BEST7003 to infection by at least one B. subtilis phage selected from the group consisting of SPO1L1, SPO1L2, SPO1L4 and SPO1L5,
thereby treating the bacterial infection in the subject.

19. (canceled)

20. The method of claim 18, comprising administering to the subject a therapeutically effective amount of an antibiotic.

21-27. (canceled)

28. The method of claim 18, wherein said phage is the genetically modified phage of any one of claims 1-5, 9-12 and 14.

29. The method of claim 18, wherein said bacteria is selected from the group consisting of E. coli, P. aeruginosa, K. pneumoniae and C. difficile.

The application's sequence listing, which the Patent Office published only in electronic form, follows.

SEQUENCE LISTING (1309 sequences)

SEQ ID NO: 1 - DNA, 651 bp, synthetic construct
  misc_feature 1..651: note = Identified candidate gene NA sequence
  source 1..651: mol_type = other DNA
atggataaaggagcatacaagaacacaagaagttcagaaatggggaagaatgaggagttcgaacctgtattagaacgtgacttctcagttgaggagatgctataccctaacctaaaacttccgaccaccccgggagaggctttaaagcaacagctcaatggaatgaaaaaagcacctaatttaacatcgttgattacccgtaaggctactgatgaggaatatgaggagattctggaccttttaacagacttggctaagtttacgtataatcaatacaagttcttcattgcaaaatcaccagacgaaacagagcatttaaactttgtcagcgttgtcagcttctctgaagaagcgaagaatgttcacgcagagatttttagaaaaggtgtagcttacggtattgatatggtggagctaagtagtcgttttgctaaacgagcagcgcttggtaaagtcctcgatctaggtgaagacgttgtgatcattactgatgatggcacgggtaaccctccaacaggagtatctcctattaactcaggaatcgaaggtggggaaatccgcttcaacttctccttcatcaaaaaggataattatgaggcttgggagaaaaaggcgttcccgaaatctgagggagaagatcaaggtgagtga

SEQ ID NO: 2 - DNA, 198 bp, synthetic construct
  misc_feature 1..198: note = Identified candidate gene NA sequence
  source 1..198: mol_type = other DNA
atggcgtataacaacatgaacggtagactaattgatcctagagtcagtgattacatccagttacttcaggatcatatggaagtatacggagatactcgtgttaaggcttactttgaaggagagctattacatcatgaagttcaagcggagcattttaggaacgccttagtgcttaactttgaggaggaagaagaatga

SEQ ID NO: 3 - DNA, 204 bp, synthetic construct
  misc_feature 1..204: note = Identified candidate gene NA sequence
  source 1..204: mol_type = other DNA
ttgagaggtaaagcggtttatctaaccagagaagaaatgagattgattgacttatgtttgaataatgtagagcctgatgacttcatcgacactgatctttttccaatggagattagtcttggtattgaacccgatcataaagcatacagagcgtggcattcagtaaaggataaactttttaaagcgttagggggagacgtatag

SEQ ID NO: 4 - DNA, 2127 bp, synthetic construct
  misc_feature 1..2127: note = Identified candidate gene NA sequence
  source 1..2127: mol_type = other DNA
gtgcagtacgacattcggttcctacaactcactaaagggtttatagacttttgtaatcatcgggataccaaggttatgtactacctacttgtagatcaggataaggatgcttcattgaagttgagtaacctgagctatgaaatgacggatatgggtgggtacgacaaaccactagaagattttaagaaaaaatacgtagaagattatgttgctaaagagcgagctcgaatcaaccagttgaaagaggactacaagaaagcagtagctaaagaaagggctttagccaaagaggagaaaaggaaagcgcaattacctcctaaaccaaagttccctaaagttactcctcctgtaaacgagatagatggtagtgactttaactatgaatggattcctttagaaagcatgttatctccttacgcatctggagacgttgatgcttgtctacgtatacataacttcttagagaagaaaggtcaagcagaagaaaacgccaaaattagaaagctgtacactgagcattatacagagctgtccgcataccttgctaaggtagaggctgcgggggttcaaatgaacacggattacaccagaggacttattgatgcgtatacagaagaagaagacagactccttcagctgatccgtaagttcccagaagtgcagagacttgaagaagagcatgaggcactatacatgaaaggtttagaagagtggtctaagccgaaagccatgcggaatgaagaaattgcaaagctacgtgataagtacaaaaagaagctagtcttcaaccccaattcctcagaggacaaacagaaagctctgtataagtacactggatacagacttccatacaacaaagagttggttgttaagtccgcttttgaggatggaataagtgaggatgagctagagtggtatcattataaagcggataagacagctttagagtacatcaaagagaactttgaggacctcaaagaactagctgagttgctgctaactcactcattggttaagactcggaaacagaactttacatataagctgctagacttagtaaatgacaagaagcggctgtatggtacgtttaaccctacaggtactgagactacacgtctttcctctagggacccaaatttacagcagattccgaggaagacagggaacgttaagcggttcgactacaagcaccctattaaacggatgtttgttacaagcttcccgggaggagccttgttacagcttgactatagttccctagagtctcgtatattaggtttggcggctggggacgaagagatgactcaacagttcttagatggacgagacttgcacaaagagacagcaacctttgtatacggagtgtctatggaccaagttactgaagacatgcgttccatggctaaagccgtaacattcggactcgcatacggggagactcctttctccttcgcaccgaaaaacaacatgtccgttgaagaagctgaagtcatcttccagaaatacttccagaacaagccgaaagttaaacagttcattgatgctacacacgaacaagtgaaaaaagatggttttgtagagtgtatgcagggattcagacggaacctacgtaacgtgttctcacaagataagtcaaaagtaaacgaagccttacgtcagtctgtaaacaccaagattcaaggttcaggggcattcttaacgaactcctctgtaattctgatcattaagttcattgagaagaacaacttgcgttctaaagtcgttctaacagtacacgactctatcgtaattgactgcccgccggaagaaatccatatcatggcacatgcagctaaacacatcatggagaacttacctatcgactggttgttcatcgactggaaaggcgagagacttcgttatccaatcaaagctgatgttgagatcggtactaactacaatgacatggttgcttacgataaagatgatcttaacagctttaaaacggtccagaaatactgtgacttctacttagctaagaaggaaatcaagaaccataaagagacaggaactatcactgaagagcggtatgaggagctcaaagagcttatcgacagccgtaaaccagcttaccaagaagctgtataa

SEQ ID NO: 5 - DNA, 429 bp, synthetic construct
  misc_feature 1..429: note = TAD1 NA sequence
  source 1..429: mol_type = other DNA
atgagggaattaaaacatgagttactgcccaccagacatacacaggtgttccatgaagacaaagataaaatggagttcaacgcacctcatcatttcgtagtggttcctgccggaagtcctttagtcgatcagcagattcactatggaagaggcggaaatagcaagaaggttaccgtaaaagactttgcaggtaaattggctacagtaaactttcagctaggtccagttacagagcatggagccaatggggttatgaatgaggacctcatcgcaatggttattactcgcttacagtattttcagaatagtgaatttaattgccgggagaacgctatggcaattacaaaacttgaagaggcgcttatgtggcttaataaacgtacagcagaacgagaacagcgtggagtagaaggaactcacgagaagtaa

SEQ ID NO: 6 - DNA, 714 bp, synthetic construct
  misc_feature 1..714: note = Identified candidate gene NA sequence
  source 1..714: mol_type = other DNA
ttgttagaaatttggaaatctctctccgaggttgttgagtatggtaacaattatgaagtgagtaacttaggaaatatccgtaataaacaaactggtagactgcttaaaggtaggctgaaccctaaagggtatttaggggttaacctatatcttaatggaaagagtaaatactactcagttcaccgactcgtggcgaccgcttttctccctaaccctgaaggtaagccgcaggtgaaccatataaaaggtgacgagaaacagaacaactcagtaactaacttagagtgggtgactggacatgaaaatattcaacacgctttcagtaccggacttcagaaagctcgaaaaggagagtcaaactctaaatctgttcttcgggaagatgatgtagtaaatataaagacagcattgactgcgggggtatctcagtacaagctagcttccttatacaaggttagtagatcaaccattaggagtatacaaaacgggagctcatgggcgcacgttaaagtaactgggtttacccccttctctaagaatgtgttaggtgagagcaactgtaaagcaaagcttactgctgagaaggtttctaagatcagagaaatgtacaggaccggagaatactcccagagagaacttggaaaaagatttaatgtctcgaagacaacaattgcaaacatcatcaataacaaaatctggagccacgttatctag

SEQ ID NO: 7 - DNA, 240 bp, synthetic construct
  misc_feature 1..240: note = Identified candidate gene NA sequence
  source 1..240: mol_type = other DNA
atgacaagtattgaaaaaagactagcggtcatcagagcggcacaggataatcacattagttctactgaggaggcacaggcggcaatagagtttgttctcgatcttgtacacattcagctaaaggaaatgaaagaagatgagccatgggcggaggacagcatcagagcattggaagagacagaaaggcatctaggttcactagacgttgatcttgcagatgagttagatgggcttgtttaa

SEQ ID NO: 8 - DNA, 165 bp, synthetic construct
  misc_feature 1..165: note = Identified candidate gene NA sequence
  source 1..165: mol_type = other DNA
atggatattaaagaactatctatagacgcacaggttaaagcatataatgagtttgtagagtgggttgatcagcaaggacatgagggaggacacactttcactgagtttattgagacttcagaggttaacggctggaagtatgacgaacaaggaaatttaatttaa

SEQ ID NO: 9 - DNA, 303 bp, synthetic construct
  misc_feature 1..303: note = Identified candidate gene NA sequence
  source 1..303: mol_type = other DNA
atgtttgttaccagcttcccgggaggagccctgttacagcttgactacagttccctagagtctcgtatcttaggtttggcggctggggacgaagagatgactcaacagttcttagatggacgagacttgcacaaagaaacagcaaccttcgtatacggagtgtctatggaccaagttactgaagacatgcgttccatggctaaagccgtaacattcggactggcatacggtactttaaatacatttgccgtagtaaaactcagtgaacctacaaatgtagggtgtctgcttatagcaggctaa

SEQ ID NO: 10 - DNA, 693 bp, synthetic construct
  misc_feature 1..693: note = Identified candidate gene NA sequence
  source 1..693: mol_type = other DNA
atggcagtaatatttaagccgggagaacggcagtaccataataatctttataaaaaactaaggaaaacgtggtatgacatgatacagcgatgttataaccccaaccatcctagttataaattttatggagcaatcggtgtaacagttactagtcagtggcactcactggatggcttccttgagacggtggatactgtagatggttgggatgctgataggtataccaacgaaacaatgcacttagacaaggatttaaaagttaaagggaacagcgtgtacagcccagcaacctgtatgtttgtcaccccggaagaaaactatagacccacccgagaggcgaggatgaaagactgtgaggcagtatcccctgaggggaaaacttataagttttctaataaggagcagttttgtagggagcatggtttaaatccctctaatgtctatctctgtttggtaggaaaatatagacatcataaaggttggaggtttaactatgcagacggttctactccccaaaatacaacgaataaccgaggtaaacctaaagtagcggtagacccggaaggggtaacatatgagttctggaatcaaagtaagtttgccagagagcatggtttagaccctagaaaaataagtgcagtaatcaatggtaaacgcccccaccataagcagtggaaattttatttaaaataa

SEQ ID NO: 11 - DNA, 660 bp, synthetic construct
  misc_feature 1..660: note = Identified candidate gene NA sequence
  source 1..660: mol_type = other DNA
atgtctgtagaagaagctgaagtcatcttccagaaatacttccagaacaagccgaaagttaaacagttcattgatgctacacatgctcaagtgaaaaaagatggctttgtagaatgtatgcaaggattcagacggaacctacgcaacgtgttctcacaagataagtcaaaagtaaacgaagccttacgtcaatctgtaaacaccaagattcagggttcaggggcattcttaacgaactcctctgtaattctgatcattaagttcattgagaagaacaacttgcgttctaaagtcgttctaacagtacatgactccatcgtaattgactgcccgccggaagaaattcatatcatggcacatgcagctaaacacatcatggagaacttacctatcgactggttgttcatcgactggaaaggtgagagacttcgttacccaatcaaagctgatgttgagatcggtactaactataatgacatggttgcttacgataaagacgatcttaacagctttaaaacggtccagaaatactgtgacttctacttagctaagaaggaaatcaagaaccacaaagagacaggaactatcactgaagagcggtatgaggagcttaaagagcttatcgacagccgtaaaccagcttaccaagaagctgtataa

SEQ ID NO: 12 - DNA, 135 bp, synthetic construct
  misc_feature 1..135: note = Identified candidate gene NA sequence
  source 1..135: mol_type = other DNA
atgaagatgaagatgaagatgaagatgaatgggaagatgaagagaccgagtaatcggtccttttttcttatctataggcagggttcaagaaacaaaaaacctaacaaaatagtgtataatagagatagagggtaa

SEQ ID NO: 13 - DNA, 114 bp, synthetic construct
  misc_feature 1..114: note = Identified candidate gene NA sequence
  source 1..114: mol_type = other DNA
atgagctttattgagtctaaccgagaagacttgggggataaaaaagctctagacatgctgctaaagggtgtaaaaaggattattaaagcgggggaagacagtgagagaccttaa

SEQ ID NO: 14 - DNA, 441 bp, synthetic construct
  misc_feature 1..441: note = Identified candidate gene NA sequence
  source 1..441: mol_type = other DNA
atgagcatagttgtgagactaaatttaaaagaagatgacagaaccccagtaattacttcagagcaggcaaagagcctaaaaaggtttctggagttcttcccacacaaaatagaggcgtttcattatgcaaacaaacaccatggtaaccctgaagaactagacttcctagagggtcttcatgacctgcgtaaggaccttctgttggaaatccttatctccggtagatatgttgtggacgtttgtctcaaagagattacagcttctttcaagccttggaacgactttaacattgaggagactattaagaatagccttacaccggaagagctagagaacactaagctggtggagacgctaagaagaactttggaagagcataagaaaagcttaccgacagagctgaagtttgaatactacctcgatcctagggtgaacctgtga

SEQ ID NO: 15 - DNA, 162 bp, synthetic construct
  misc_feature 1..162: note = HAD1 NA sequence
  source 1..162: mol_type = other DNA
atggaagagtttaaaatgactgtatggactaatgggaaggctatacggaagtacacaggacaggataagcacccggacactaatcctagcaagcggatggagtggtttaaggctactgccattataaaacctgacactggtgataataatgaaagagattag

SEQ ID NO: 16 - DNA, 888 bp, synthetic construct
  misc_feature 1..888: note = GAD1 NA sequence
  source 1..888: mol_type = other DNA
atgaagctaattggtattaaaacaagtaactgttttttggtgtcagacaatattgagggcaagagatattttcatagtcaattagatgaattgcttttcgatgggaaacgagcaactgaaacgtataagtcggactggtttaagcttgaaaaggagccaagtgttattgaaaaacaaatgccagctaaaaaaatcaatcataggtatgaattaaaagagggattccaagaatctgaattaactcctaaagtaattaaagcttcttacataggtgaagacagtgaatactatgaagtgaaggggctatatgatttgaaatttgaagaaatcccacaacaaaatgaaaaaattgagtttgaaatgaatgtaattgaagaaattgacggagaacttaagctacaaagtcataattttaacttgaattataacttactggatagaattcaaacacatccaatgcttcttgaaacaaagccgtgttacctgtcccaagaagaaagctataagattatcagaaaccatataaaggccaatataaaccctaagtttgcaagaatcacgagtgattatgatttctgtttaactgtggtcaaggttctggagctttacaaacctcacgagtatatagttgatcttaatgcaatgtacaaacggagaaagcctaaacttgagaaaaggtttcaaacaaagcgggaagttgaaatttacaaggttgcacctaaagcctatcagagctacccaattgtagagccttttagcggtaaggacgttgaggatttgaagagtaatattaagaaatttttagatgatctgatggctaaaatcaacgagcctttagtcgaatgtaaatgctgcaaaggaagaggggttattttaaatgaaaattaa

SEQ ID NO: 17 - DNA, 273 bp, synthetic construct
  misc_feature 1..273: note = Identified candidate gene NA sequence
  source 1..273: mol_type = other DNA
atgaaaattaaattggacaaagattacatggtaaatgaattgggactgccggaatcctcaattttagaagaaatcactgacacgtctaggtggagcattcactatagaattgtgttctcatatcagggtcgctttcttgaaactttctatagcaaaggcgcaactgaaaatcagtatgaaagcccttgggaatttgaagaacaagtggattgttatgaagtggagttaaaagaagtgaaggttagaaaatggataagaaaagaatctaaataa

SEQ ID NO: 18 - protein, 216 aa, synthetic construct
  REGION 1..216: note = TAD1 homologous NA sequence
MDKGAYKNTRSSEMGKNEEFEPVLERDFSVEEMLYPNLKLPTTPGEALKQQLNGMKKAPNLTSLITRKATDEEYEEILDLLTDLAKFTYNQYKFFIAKSPDETEHLNFVSVVSFSEEAKNVHAEIFRKGVAYGIDMVELSSRFAKRAALGKVLDLGEDVVIITDDGTGNPPTGVSPINSGIEGGEIRFNFSFIKKDNYEAWEKKAFPKSEGEDQGE

SEQ ID NO: 19 - protein, 65 aa, synthetic construct
  REGION 1..65: note = TAD1 homologous NA sequence
MAYNNMNGRLIDPRVSDYIQLLQDHMEVYGDTRVKAYFEGELLHHEVQAEHFRNALVLNFEEEEE

SEQ ID NO: 20 - protein, 67 aa, synthetic construct
  REGION 1..67: note = TAD1 homologous NA sequence
MRGKAVYLTREEMRLIDLCLNNVEPDDFIDTDLFPMEISLGIEPDHKAYRAWHSVKDKLFKALGGDV

SEQ ID NO: 21 - protein, 708 aa, synthetic construct
  REGION 1..708: note = TAD1 homologous NA sequence
MQYDIRFLQLTKGFIDFCNHRDTKVMYYLLVDQDKDASLKLSNLSYEMTDMGGYDKPLEDFKKKYVEDYVAKERARINQLKEDYKKAVAKERALAKEEKRKAQLPPKPKFPKVTPPVNEIDGSDFNYEWIPLESMLSPYASGDVDACLRIHNFLEKKGQAEENAKIRKLYTEHYTELSAYLAKVEAAGVQMNTDYTRGLIDAYTEEEDRLLQLIRKFPEVQRLEEEHEALYMKGLEEWSKPKAMRNEEIAKLRDKYKKKLVFNPNSSEDKQKALYKYTGYRLPYNKELVVKSAFEDGISEDELEWYHYKADKTALEYIKENFEDLKELAELLLTHSLVKTRKQNFTYKLLDLVNDKKRLYGTFNPTGTETTRLSSRDPNLQQIPRKTGNVKRFDYKHPIKRMFVTSFPGGALLQLDYSSLESRILGLAAGDEEMTQQFLDGRDLHKETATFVYGVSMDQVTEDMRSMAKAVTFGLAYGETPFSFAPKNNMSVEEAEVIFQKYFQNKPKVKQFIDATHEQVKKDGFVECMQGFRRNLRNVFSQDKSKVNEALRQSVNTKIQGSGAFLTNSSVILIIKFIEKNNLRSKVVLTVHDSIVIDCPPEEIHIMAHAAKHIMENLPIDWLFIDWKGERLRYPIKADVEIGTNYNDMVAYDKDDLNSFKTVQKYCDFYLAKKEIKNHKETGTITEERYEELKELIDSRKPAYQEAV

SEQ ID NO: 22 - protein, 142 aa, synthetic construct
  REGION 1..142: note = TAD1 AA sequence
MRELKHELLPTRHTQVFHEDKDKMEFNAPHHFVVVPAGSPLVDQQIHYGRGGNSKKVTVKDFAGKLATVNFQLGPVTEHGANGVMNEDLIAMVITRLQYFQNSEFNCRENAMAITKLEEALMWLNKRTAEREQRGVEGTHEK

SEQ ID NO: 23 - protein, 237 aa, synthetic construct
  REGION 1..237: note = TAD1 homologous NA sequence
MLEIWKSLSEVVEYGNNYEVSNLGNIRNKQTGRLLKGRLNPKGYLGVNLYLNGKSKYYSVHRLVATAFLPNPEGKPQVNHIKGDEKQNNSVTNLEWVTGHENIQHAFSTGLQKARKGESNSKSVLREDDVVNIKTALTAGVSQYKLASLYKVSRSTIRSIQNGSSWAHVKVTGFTPFSKNVLGESNCKAKLTAEKVSKIREMYRTGEYSQRELGKRFNVSKTTIANIINNKIWSHVI

SEQ ID NO: 24 - protein, 79 aa, synthetic construct
  REGION 1..79: note = TAD1 homologous NA sequence
MTSIEKRLAVIRAAQDNHISSTEEAQAAIEFVLDLVHIQLKEMKEDEPWAEDSIRALEETERHLGSLDVDLADELDGLV

SEQ ID NO: 25 - protein, 54 aa, synthetic construct
  REGION 1..54: note = TAD1 homologous NA sequence
MDIKELSIDAQVKAYNEFVEWVDQQGHEGGHTFTEFIETSEVNGWKYDEQGNLI

SEQ ID NO: 26 - protein, 100 aa, synthetic construct
  REGION 1..100: note = TAD1 homologous NA sequence
MFVTSFPGGALLQLDYSSLESRILGLAAGDEEMTQQFLDGRDLHKETATFVYGVSMDQVTEDMRSMAKAVTFGLAYGTLNTFAVVKLSEPTNVGCLLIAG

SEQ ID NO: 27 - protein, 230 aa, synthetic construct
  REGION 1..230: note = TAD1 homologous NA sequence
MAVIFKPGERQYHNNLYKKLRKTWYDMIQRCYNPNHPSYKFYGAIGVTVTSQWHSLDGFLETVDTVDGWDADRYTNETMHLDKDLKVKGNSVYSPATCMFVTPEENYRPTREARMKDCEAVSPEGKTYKFSNKEQFCREHGLNPSNVYLCLVGKYRHHKGWRFNYADGSTPQNTTNNRGKPKVAVDPEGVTYEFWNQSKFAREHGLDPRKISAVINGKRPHHKQWKFYLK

SEQ ID NO: 28 - protein, 219 aa, synthetic construct
  REGION 1..219: note = TAD1 homologous NA sequence
MSVEEAEVIFQKYFQNKPKVKQFIDATHAQVKKDGFVECMQGFRRNLRNVFSQDKSKVNEALRQSVNTKIQGSGAFLTNSSVILIIKFIEKNNLRSKVVLTVHDSIVIDCPPEEIHIMAHAAKHIMENLPIDWLFIDWKGERLRYPIKADVEIGTNYNDMVAYDKDDLNSFKTVQKYCDFYLAKKEIKNHKETGTITEERYEELKELIDSRKPAYQEAV

SEQ ID NO: 29 - protein, 44 aa, synthetic construct
  REGION 1..44: note = TAD1 homologous NA sequence
MKMKMKMKMNGKMKRPSNRSFFLIYRQGSRNKKPNKIVYNRDRG

SEQ ID NO: 30 - protein, 37 aa, synthetic construct
  REGION 1..37: note = TAD1 homologous NA sequence
MSFIESNREDLGDKKALDMLLKGVKRIIKAGEDSERP

SEQ ID NO: 31 - protein, 146 aa, synthetic construct
  REGION 1..146: note = TAD1 homologous NA sequence
MSIVVRLNLKEDDRTPVITSEQAKSLKRFLEFFPHKIEAFHYANKHHGNPEELDFLEGLHDLRKDLLLEILISGRYVVDVCLKEITASFKPWNDFNIEETIKNSLTPEELENTKLVETLRRTLEEHKKSLPTELKFEYYLDPRVNL

SEQ ID NO: 32 - protein, 53 aa, synthetic construct
  REGION 1..53: note = HAD1 AA sequence
MEEFKMTVWTNGKAIRKYTGQDKHPDTNPSKRMEWFKATAIIKPDTGDNNERD

SEQ ID NO: 33 - protein, 295 aa, synthetic construct
  REGION 1..295: note = GAD1 AA sequence
MKLIGIKTSNCFLVSDNIEGKRYFHSQLDELLFDGKRATETYKSDWFKLEKEPSVIEKQMPAKKINHRYELKEGFQESELTPKVIKASYIGEDSEYYEVKGLYDLKFEEIPQQNEKIEFEMNVIEEIDGELKLQSHNFNLNYNLLDRIQTHPMLLETKPCYLSQEESYKIIRNHIKANINPKFARITSDYDFCLTVVKVLELYKPHEYIVDLNAMYKRRKPKLEKRFQTKREVEIYKVAPKAYQSYPIVEPFSGKDVEDLKSNIKKFLDDLMAKINEPLVECKCCKGRGVILNEN

SEQ ID NO: 34 - protein, 90 aa, synthetic construct
  REGION 1..90: note = Identified candidate gene AA sequence
MKIKLDKDYMVNELGLPESSILEEITDTSRWSIHYRIVFSYQGRFLETFYSKGATENQYESPWEFEEQVDCYEVELKEVKVRKWIRKESK

SEQ ID NO: 35 - DNA, 345 bp, synthetic construct
  misc_feature 1..345: note = TAD1 homologous NA sequence
  source 1..345: mol_type = other DNA
atgaaaaaaataagtgaaaacggattaaattcagtatttgttaaagatgaaataaaatttaatggtcatcatgaatatgaaataagaagaaatgataataatgaattattattaaaaatacaatatcaagaaggagcaagaaaagaacataactctattccaggcatattggatttagatttattgtatatagtaagagatagaattcaaacatttcaaaaaggagaatttgcttgtagagaaaatgctttagtgttaactaaagttgaggaagcaataatgtggtctgaagctagagttagagatagagaaaaaagaaaagtattaagaacatataataaataa

SEQ ID NO: 36 - DNA, 360 bp, synthetic construct
  misc_feature 1..360: note = TAD1 homologous NA sequence
  source 1..360: mol_type = other DNA
atgaaaaaactgtccgtgattcaaaagaacaataatccgcacacaatctaccggaacggcgatcagggtccgggcggcggataccacgattacacggtcatggacgcggaaggaagcgccgtgatcgcgctggtgcggtttcagaagggttcgcggaatgacccgaagtcgcaggccggcgttctggatgcggatctgctggagatcgtgcgggaccggctgacggccttcaataagggcgaatttgccacgcgggagaacgcctgcgcaatcacacacattgaggaagccctgatgtggatggcgaaacgcgccgatgaccgggcagagcgcggcgtactggggacgtataacaaatga

SEQ ID NO: 37 - DNA, 360 bp, synthetic construct
  misc_feature 1..360: note = TAD1 homologous NA sequence
  source 1..360: mol_type = other DNA
atgaaaaaactgtctgtgattcaaaagaacaataatccgcacacaatctaccggaacggcgatcagggtccgggcggcggataccacgattacacggtcatggacgcggaaggaaacgccgtgatcgcgctggtgcggtttcagaaaggttcgcggaatgacccgaaggcgcaggccggcgttctggatgcggatctgctggagatcgtgcgggaccggctgacggcgttcaacaggggagaatttgccacacgggagaacgcctgcgcaatcacacacattgaggaagccctgatgtggatggcgaaacgcgccgatgaccgggcagagcgcggcgtactggggacgtataacaaatga

SEQ ID NO: 38 - DNA, 384 bp, synthetic construct
  misc_feature 1..384: note = TAD1 homologous NA sequence
  source 1..384: mol_type = other DNA
atgaaaaaattaattacaattcaaaaaagagaaaagttaaatgatgtatatgcaatagatgaagtaggaccaggaggagctaatcatagatatgcaatagtacctaaaggtgaggaagaagtacgattaataacaacttatcaacctatgtctgaaattcaattacaatgtggtgctaggaaagaagaaaactcaatacatggagttatagatgcagatttattagagatagtaaggcatagattacaatgttttcaggctggaccatttgctagtgaatataattctaaggctttagaacatatagaaatagcattaatgtatatgaatagaagagttgaggatagaatagaacgtaatgtattaggtacttataataaataa

SEQ ID NO: 39 - DNA, 402 bp, synthetic construct
  misc_feature 1..402: note = TAD1 homologous NA sequence
  source 1..402: mol_type = other DNA
atgaaaaaattatcaacaatccagaaaagagaaaaattaaatgatgtatttgccgtagatgaaatcggtccaggtggtgctaaccacttatattgtgtgtacaaggctggaacagcaacgcttgaagatgatgacacatcgttaagagcggaaccagagaatctgcttcttacattgcagatgcagtgcggaccacgaaaagaaaaagattcgcttcacggtgtaatcgacacagatttactggaaattgtccgcgatcgcttaaaggcttttcaggcaggaccgttttcgtcaagagaaaatgcttgtgcacttactcatattgaggaagctcttatgtggatgaatcgtagaacagaagatcgcattgaaagaaatgttcttggaaagaacgaaaaataa

SEQ ID NO: 40 - DNA, 402 bp, synthetic construct
  misc_feature 1..402: note = TAD1 homologous NA sequence
  source 1..402: mol_type = other DNA
atgaaaaaattatcaacaattcagaaaagagaaaaattaaatgatgtatttgccgtagatgaaaacggtccaggtggtgctaaccacttatattgtgtgtacaaggttggaacagcaacgcttgaagatgatgacacatcgttaatagcggaaccagagaatctgcttcttacattgcagatgcagtgcggaccacgaaaagaaaaagattcgcttcacggtgtaatcgacacagatttactggaaattgtccgtgatcgcttaaaggcttttcaggcagggccgttttcgtcaagagaaaatgcttgtgcacttactcatattgaggaagctcttatgtggatgaatcgtagaacagaagaccgcattgaaagaaatgttcttggaaagaacgaaaaataa

SEQ ID NO: 41 - DNA, 402 bp, synthetic construct
  misc_feature 1..402: note = TAD1 homologous NA sequence
  source 1..402: mol_type = other DNA
atgaaaaaattatcaacaattcagaaaagagaaaaattaaatgatgtatttgccgtagatgaaatcggtccaggtggtgctaaccacttatattgtgtgtacaaggctggaacagcaacgcttgaagatgataacacatcgttaagagcggaaccagagaatctgcttcttacattgcagatgcagtgtggaccacgaaaagaaaaagattcgcttcacggtgtaatcgacacagatttactggaaattgtacgtgatcgcttaaaagcttttcaggcaggaccgttttcgtcaagagaaaatgcttgtgcacttactcatattgaggaagctcttatgtggatgaatcgtagaacagaagatcgcattgaaagaaatgttcttggaaagaacgaaaaataa

SEQ ID NO: 42 - DNA, 402 bp, synthetic construct
  misc_feature 1..402: note = TAD1 homologous NA sequence
  source 1..402: mol_type = other DNA
atgaaaaaattatcgactattcagaagagagaaaaattaaatgatgtttttgcagtagatgaagaaggccccggcggcgcgaatcatctgtacgtgatttacaagaacgggtcagcagtactggaagatggggacacatctttacgtggcaaaccagaggatctgcttcttaccgtacagatgcagtgcggaccgcgaaaagaagctgattctctgcacggtgtaattgatactgatttactggaaattgtgcgtgaccgtctgaaagcatttcaggcaggaccattttcttccagagaaaacgcatgtgctctcactcacattgaagaagctcttatgtggcttaatcgcagagttgaggatcgtatcgagagagatgtgcttggcaagaatcagaaatag

SEQ ID NO: 43 - DNA, 402 bp, synthetic construct
  misc_feature 1..402: note = TAD1 homologous NA sequence
  source 1..402: mol_type = other DNA
atgaaaaaattatcgactattcagaagagagaaaaattaaatgatgtttttgcagtagatgaagaaggccccggcggcgcgaatcatctgtacgtgatttacaagaacgggtcagcggtactggaagatggggacgcatctttacgtggcaaaccagaggatctgcttcttaccgtacagatgcagtgcggaccgcgaaaagaagctgattctctgcacggtgtaattgatactgatttactggaaattgtgcgtgaccgtctgaaagcatttcaggcaggaccgttttcttccagagaaaacgcatgcgctctcactcacattgaagaagctcttatgtggcttaatcgcagagttgaggatcgtatcgagagagatgtgcttggcaagaatcagaaatag

SEQ ID NO: 44 - DNA, 402 bp, synthetic construct
  misc_feature 1..402: note = TAD1 homologous NA sequence
  source 1..402: mol_type = other DNA
atgaaaaagttatcaacaattcagaaaagagaaaaattaaatgacgtatttgcagtagatgaaataggcccaggtggtgctaatcacttatattgcgtatacaaggctggaacggcaacgcttgaagatgatgatacgtcattaagggcagagccggaaaatcttcttcttacattacagatgcagtgtggaccacgaaaagagacagattcattacatggcgttattgatacggatttactggaaattgttcgtgaccgcctaaaatcttttcaggctggaccgtttgcatcaaaagaaaatgcatgtgcacttacccatattgaagaagcgctcatgtggatgaaccgcagagtagaggatcgtattgaaagaaatgttcttggaaagaatgaagcgtag

SEQ ID NO: 45 - DNA, 330 bp, synthetic construct
  misc_feature 1..330: note = TAD1 homologous NA sequence
  source 1..330: mol_type = other DNA
atgaaaacactaaaatataatgcactagaaaaattacacaacgaactgaatcgcggtgcgccaggcgacgaagtttctcttaatatcggcggtaaagaggtgttgaaaatcaagtttcaaactggcggtacggctaccacagagcgcaacggtgtatttattgaggacttacttattgtaacttacgcaaaactagcggactacaaccgaggattgccttgtcgcgaaaacagtttagcccttacgaaaattgaggaagctattatgtggctggctaatcgtaaggttgagcgtgaatctcgcggcgtgtacggtactgaggaaaaatag

SEQ ID NO: 46 - DNA, 309 bp, synthetic construct
  misc_feature 1..309: note = TAD1 homologous NA sequence
  source 1..309: mol_type = other DNA
atgaaaacattaacacaaggtcacaagtacgaattgaaaggatttgaaaacgcaaaaattacgcaaacaatccaatttatagaaaaagcaccaattggagatactacagaattagaaacaattaacgatggtaccacaaacgaagaagtattggaaatgttaattgatagaatgaattatttacaaggtaggttcccttgcgaagaaaatgcaattgtaattacgaaccttcaggaaagtttaatgtggttagaaaaacgaacatctgatcgtaaaaaaagaaatgtagaaggaagtaacaaagcttaa

SEQ ID NO: 47 - DNA, 330 bp, synthetic construct
  misc_feature 1..330: note = TAD1 homologous NA sequence
  source 1..330: mol_type = other DNA
atgaaaactaccaaatataatgcactagaagaattgcacaatgaactgaatcgcggcacgccaggcgacgaagtttctcttaatatcgcgggcaaagaggtactgaaaatcaagtttcaaactggcggcacagctaccacagagcgcaacggtgtatttattgaggacttgcttattgtagcttactcaaaactagcagactacaaccgaggattgccttgtcgtgaaaacagtttagctcttacgaaaattgaggaagctattatgtggctggctaatcgtaaggttgagcgtgaatctcgcggcgtgtacggtactgaggaaaaatag

SEQ ID NO: 48 - DNA, 330 bp, synthetic construct
  misc_feature 1..330: note = TAD1 homologous NA sequence
  source 1..330: mol_type = other DNA
atgaaaactaccaaatataatgcactagaagaattgcacaatgaactgaatcgcggcacgccaggcgacgaagtttctcttaatgtcgcgggcaaagaggtgctgaaaatcaagtttcaaactggcggcacagctaccacagagcgcaacggtgtatttattgaggacttgcttattgtagcttactcaaaactagcagactacaaccgaggattaccttgtcgtgaaaacagtttagctcttacgaaaattgaggaagctattatgtggctggctaatcgtaaggttgagcgtgaatctcgcggcgtgtacggtactgaggaaaaatag

SEQ ID NO: 49 - DNA, 399 bp, synthetic construct
  misc_feature 1..399: note = TAD1 homologous NA sequence
  source 1..399: mol_type = other DNA
atgaaaagactagaacatgatttactaacgagaaagtacactgaggtatttcacgaagaggagtttacaaacaatgctccacatcactttgaagtttatgctaacactggaatcgttatgtacaatcctaataacgtcgagaacgataatccattacctttaaaggttggagaggttaattttcaagaaggaccaatccaagaagctggtattaacggtgtaatgaatgaggatcttatcgctatggttatttgtcgccttgaacatttcaaccaaacagatttccgttgtagagagaactcaatggcaatcactaagttagaagaggcgttactgtggcttagaaaacgaactgtgggtagggaaaaacgaggcgtagaaggtacgcatactaaataa

SEQ ID NO: 50 - DNA, 399 bp, synthetic construct
  misc_feature 1..399: note = TAD1 homologous NA sequence
  source 1..399: mol_type = other DNA
atgaaaagactagaacatgatttgctaacgagaaagtacactgaggtatttcacgaagaggagtttacaaacaatgctccacatcactttgaagtttatgctaacactggaatcgttatgtacaatcctaataacgtcgagaacgataatccattacctttaaaggttggagaggttaattttcaagaaggaccaatccaagaagctggtattaacggtgtaatgaatgaggatcttatcgctatggttatttgtcgccttgaacatttcaaccaaacagatttccgttgtagagagaactcaatggcaatcactaagctagaagaggcgttactgtggcttagaaaacgaactgtgggtagggaaaaaagaggcgtagaaggtacgcatactaaataa

SEQ ID NO: 51 - DNA, 399 bp, synthetic construct
  misc_feature 1..399: note = TAD1 homologous NA sequence
  source 1..399: mol_type = other DNA
atgaaaagactagaacatgatttgttaacaagtaagtatacaaaggtatttcatgaagaggagtttacaaacaatgctccacatcacttcgaagtttatgctaacaccggaatcgttatgtacaatcctaataacgtcgagaacgataacccactacctttaaaggttggagaagttgattttcaagaaggaccaatcaaagaagctggtattaacggtgtaatgaatgaagatcttatcgctatggttatttgtcgtcttgaacatttcaatcaaacggatttccgttgtaaagagaactcaatggcaatcactaagctagaagaggcgttactatggcttagaaaacgcactgtgggtagggaaaaacgaggcgtagaaggtacgcatactaaataa

SEQ ID NO: 52 - DNA, 399 bp, synthetic construct
  misc_feature 1..399: note = TAD1 homologous NA sequence
  source 1..399: mol_type = other DNA
atgaaaagactagaacatgatttgttaacaagtaagtatacaaaggtatttcatgaagaggagtttacaaacaatgctccacatcacttcgaagtttatgctaacactggaatcgttatgtacaatcctaataacgtcgagaacgataacccactacctttaaaggttggagaagttgattttcaagaaggaccaatcaaagaagctggtattaacggtgtaatgaatgaagatcttatcgctatggttatttgtcgtcttgaacatttcaatcaaacggatttccgttgtaaagagaactcaatggcaatcactaagctagaagaggcgttactatggcttagaaaacgcactgtgggtagggaaaaacgaggcgtagaaggtacgcatactaaataa

SEQ ID NO: 53 - DNA, 315 bp, synthetic construct
  misc_feature 1..315: note = TAD1 homologous NA sequence
  source 1..315: mol_type = other DNA
atgaaaatcctcacggaaggacacagatacgaactcgcgaacttcgagaaaaaggacgctcccggccaggtgattcagttcatcgaaaaggttccggagtctccgggttccgcaaccctcgtcaccgtcaatgacgggactaccaatgaggagttggcgcgtgtccttatcaaccgcatccagcacctcaacggcaaattcccctgccgcgaaaacgccatcgccatcacgcacttcgagacggggttgatgtggctcgaaaagcgcacggcggaccgcgtggctcgcaacgtcgaaggcaaggccacgacctaa

SEQ ID NO: 54 - DNA, 387 bp, synthetic construct
  misc_feature 1..387: note = TAD1 homologous NA sequence
  source 1..387: mol_type = other DNA
atgaaacaattaaacactattcaaaaaatggaaaagttgaatgatgtctatgcagtagatgaaaaaggcaatggaggagcaaaccatagatatgtaatatgtaagcaaggtgaaactaggtggtgtaatgggaataattcagagggagtgtattctgatatacaatttcaaaatggtgcaagaaaggaagaaaactcaatccatggagtagcaaatgaggacttattagaaatagtaagacacagattacaatgttttcaagcaggaccatttgcgagtaaatataacgaggaggctctaaaacacatagaagaagctttgcattgtatgaatgctagagtagaggatagagttaaaagaaatgtattaggaaggaatgaaaaataa

SEQ ID NO: 55 - DNA, 402 bp, synthetic construct
  misc_feature 1..402: note = TAD1 homologous NA sequence
  source 1..402: mol_type = other DNA
atgaaacaattaaacactattcagaaattggaaaagctcaatgacgtttttgcgattgatgaagtaggtccgggtggtgcttatcatctttaccagatttgtaagcacaatacggcacgaattgttgaggaggacggcactttcaggacaagacctgagaatatgattgccacaattcagatgcaatgcggggcaagaaaagatccggatgctatcagcggtgccattgattctgatttgctggagattgtcagagacaggctcacagctttccagagtggcccttatccgtcgcatgaaacggaacaggctctacttcacgtcgaggaggctcttttgtggctcaataaaagagttgaggatcgagctgaacgcggtgtacttggaacagaaaccaagtaa

SEQ ID NO: 56 - DNA, 402 bp, synthetic construct
  misc_feature 1..402: note = TAD1 homologous NA sequence
  source 1..402: mol_type = other DNA
atgaaacagttaaacacaattcagaaaatggaaaagctaaatgatgtattcgccattgatgaggttggacctgggggcgcgcaccacttataccaggtatgcaagctcaacacaggacgcatctctgatgaggacaacactttccgtacaagaccggaaaatatgcttgcaacaatccagatgcagtgtggcgcaagaaaagatcctgacgcagtcagcggtgttattgattctgacttactggaaattgtcagagacagactttccgctttccagcagggtccttatccatcttacgaaacagctcaggcgttataccatgttgagggagcgcttatgtggctcaatcgtagagttgaagatcgcgcaacgcgcggagtattaggaactgaaacaaaatag

SEQ ID NO: 57 - DNA, 402 bp, synthetic construct
  misc_feature 1..402: note = TAD1 homologous NA sequence
  source 1..402: mol_type = other DNA
atgaaacagttaaacacaattcagaaaatggaaaagctcaatgacgtattcgccattgatgaggttggacctgggggcgcgcaccacttataccaggtatgcaagctcaacacaggacgcatctctgatgaggacaacactttccgtacaagaccggaaaatatgcttgcaacaatccagatgcagtgtggcgcaagaaaagatcctgacgcaatcagcggtgttattgattctgacttactggaaattgtcagagacagactttccgctttccagcagggtccttatccatcttacgaaacagctcaggcgttataccatgttgagggagcgcttatgtggctcaatcgtagagttgaagatcgcgcaacgcgcggagtattaggaactgaaacaaaatag

SEQ ID NO: 58 - DNA, 402 bp, synthetic construct
  misc_feature 1..402: note = TAD1 homologous NA sequence
  source 1..402: mol_type = other DNA
atgaaacagttaaacacaattcagaaaatggaaaagctcaatgacgtattcgccattgatgaggttggacctgggggcgcgcaccacttataccaggtatgcaagctcaacacaggacgcatctctgatgaggacaatactttccgtacaagaccggaaaatatgcttgcaacaatccagatgcagtgtggcgcaagaaaagatcctgacgcaatcagcggtgttattgattctgacttactggaaattgtcagagacagactttccgctttccagcagggtccttatccatcttacgaaacagctcaggcgttataccatgttgagggagcgcttatgtggctcaatcgtagagttgaagatcgcgcaacgcgcggagtattaggaactgaaacaaaatag

SEQ ID NO: 59 - DNA, 402 bp, synthetic construct
  misc_feature 1..402: note = TAD1 homologous NA sequence
  source 1..402: mol_type = other DNA
atgaaacagttaaacacaattcagaaaatggaaaagctcaatgacgtattcgccattgatgaggttggacctgggggcgcgcaccacttataccaggtatgcaagctcaacacaggacgcatctctggtgaggacaacactttccgtacaagaccggaaaatatgcttgcaacaatccagatgcagtgtggcgcgagaaaagatcctgacgcaatcagcggtgttattgattctgacttactggaaattgtcagagacagactttccgctttccagcagggtccttatccatcttacgaaacagctcaggcgttataccatgttgagggagcgcttatgtggctcaatcgtagagttgaagatcgcgcaacgcgcggagtattaggaaccgaaacaaaatag

SEQ ID NO: 60 - DNA, 402 bp, synthetic construct
  misc_feature 1..402: note = TAD1 homologous NA sequence
  source 1..402: mol_type = other DNA
atgaaacagttaaacacaattcagaaaatggaaaagctcaatgatgtattcgccattgatgaggttggacctggaggcgcgcaccacttataccaggtatgcaagctcaacacaggacgcatctctgatgaggacaacacttcccgtacaagaccggaaaatatgcttgcaacaatccagatgcagtgtggcgcaagaaaagatcctgacgcagtcagcggtgttattgattctgacttactggaaattgtcagagacagactttccgctttccagcagggtccttatccatcttacgaaacagctcaggcgttataccatgttgagggagcgcttatgtggctcaatcgtagagttgaagatcgcgcaacgcgcggagtattaggaactgaaacaaaatag

SEQ ID NO: 61 - DNA, 402 bp, synthetic construct
  misc_feature 1..402: note = TAD1 homologous NA sequence
  source 1..402: mol_type = other DNA
atgaaacagttaaacacaattcagaaaatggaaaagctcaatgatgtattcgccattgatgaggttggacctggaggcgcgcaccacttataccaggtatgcaagctcaacacaggacgcatctctgatgaggacaactctttccgtacaagaccggaaaatatgcttgcaacaatccagatgcagtgtggcgcgagaaaagatcctgatgcaatcagcggtgttattgattctgacttactggaaattgtcagagacagactttccgctttccagcagggtccttatccatcctacgaaacagctcaggcgttataccatgttgaggaagcgcttatgtggctcaatcgtagagttgaagatcgcgcaacgcgcggagtattaggaactgaaacaaaatag

SEQ ID NO: 62 - DNA, 402 bp, synthetic construct
  misc_feature 1..402: note = TAD1 homologous NA sequence
  source 1..402: mol_type = other DNA
atgaaacagttaaacacaattcagaaaatggaaaagctcaatgatgtattcgccattgatgaggttggacctgggggcgcgcaccacttataccaggtatgcaagctcaacacaggacgcatctctgatgaggacaacactttccgtacaagaccggaaaatatgcttgcaacaatccagatgcagtgtggcgcaagaaaagatcctgacgcaatcagcggtgttattgattctgacttactggaaattgtcagagacagactttccgctttccagcagggtccttatccatcttacgaaacagctcaggcgttataccatgttgaggaagcacttatgtggctcaatcgtagagttgaagatcgcgcaacgcgcggagtattaggaactgaaacaaaatag

SEQ ID NO: 63 - DNA, 402 bp, synthetic construct
  misc_feature 1..402: note = TAD1 homologous NA sequence
  source 1..402: mol_type = other DNA
atgaaacagttaccaacaattcagaaaagagaaaaattaaatgatgtatttgctgtagatgaaatcggcccaggtggtgctaaccacttatattgtgtgtacaaggctggaacagcaacgcttgaagatgatgatacatcgttaagagcggaaccagagaatctgcttcttacattgcagatgcagtgcggaccacgaaaagaaaaagattcgcttcacggtgtaattgacacagatttactggaaattgtccgtgatcgcttaaaagcttttcaggcaggaccgttttcgtcaagagaaaatgcttgtgcacttactcatatcgaggaagctctcatgtggatgaatcgtagagtagaagatcgcattgaaagaaatgttcttggaaagaacgaaaagtag

SEQ ID NO: 64 - DNA, 402 bp, synthetic construct
  misc_feature 1..402: note = TAD1 homologous NA sequence
  source 1..402: mol_type = other DNA
atgaaacagttatcaacaattcaaaaaagagaaaaattaaatgatgtatttgccgtagatgaaatcggtccaggtggtgctaatcacttatattgtgtgtacaaggctggaacagcaacgcttgaagatgatgatacatcgttaagagcggagccagagaatctgcttcttacattgcagatgcagtgcggaccacgaaaagaaaaagcttcgcttcacggtgtaatcgacacagatttactggaaattgtacgtgatcgcttaaaagcttttcaggcaggaccgttttcgtcaagagaaaatgcttgcgcacttactcatatcgaggaagctctcatgtggatgaatcgtagagtagaagatcgcattgaaagaaatgttcttggaaagaacgaaaagtag

SEQ ID NO: 65 - DNA, 402 bp, synthetic construct
  misc_feature 1..402: note = TAD1 homologous NA sequence
  source 1..402: mol_type = other DNA
atgaaacagttatcaacaattcagaaaagagaaaaattaaatgatgtatttgccgtagatgaaatcggtccaggtggtgctaatcacttatattgtgtgtacaaggctggaacagcaacgcttgaagatgatgatacatcgttaagagcagagccagagaacctacttcttacattgcagatgcagtgtggaccacgaaaagaaaaagattcgcttcacggtgtaattgacacagatttactggaaattgtccgtgatcgtttaaaagcttttcaggcaggaccgttttcatcaagagaaaatgcttgtgcacttactcatattgaggaagctctcatgtggatgaatcgtagaacagaagaccgcattgaaagaaatgttcttggaaagaacgaaaagtag

SEQ ID NO: 66 - DNA, 402 bp, synthetic construct
  misc_feature 1..402: note = TAD1 homologous NA sequence
  source 1..402: mol_type = other DNA
atgaaacagttatcaacaattcagaaaagagaaaaattaaatgatgtatttgccgtagatgaaatcggtccaggtggtgctaatcacttatattgtgtgtacaaggctggaacagcaacgcttgaagatgatgatacatcgttaagagcggaaccggagaatctgcttcttacattacagatgcagtgcggaccacgaaaagaaaaagattcgcttcacggtgtaatcgacacagatttactggaaattgtccgtgatcgcttaaaggcttttcaggcaggaccgttttcgtcaagagaaaatgcttgtgcacttactcatattgaggaagcactcatgtggatgaaccgtagagtagaagatcgcattgaaagaaatgttcttggaaagaacgaaaagtag

SEQ ID NO: 67 - DNA, 402 bp, synthetic construct
  misc_feature 1..402: note = TAD1 homologous NA sequence
  source 1..402: mol_type = other DNA
atgaaacagttatcaacaattcagaaaagagaaaaattaaatgatgtgtttgctgtagacgaaattggtccaggcggtgctaatcacttatattgtgtgtacaaggctggaacagcaacgcttaaagatgatgatacatcgttaagagcggaaccggataatctgcttcttacattacagatgcagtgcggaccacgaaaagaaaaagattcgcttcacggtgtaatcgacacagatttactggaaattgtacgtgatcgcttaaaagcttttcaggcaggaccgttttcgtcaagagaaaatgcttgcgcacttactcatattgaggaagcgctcatgtggatgaaccgtagagtagaagatcgcattgaaagaaatgttcttggaaagaatgaaaagtag

SEQ ID NO: 68 - DNA, 402 bp, synthetic construct
  misc_feature 1..402: note = TAD1 homologous NA sequence
  source 1..402: mol_type = other DNA
atgaaacagttatcaacaattcagaaaagagaaaaattaaatgatgtgtttgctgtagacgaaattggtccaggcggtgctaatcacttatattgtgtgtacaaggctggaacagcaacgcttgaagatgatgatacatcgttaagagcggaaccagataatctgcttcttacattgcagatgcagtgcggaccacgaaaagaaaaagattcgcttcacggtgtaatcgacacagatttactggaaattgtccgtgatcgcttaaaggcttttcaggcaggaccgttttcgtcaagagaaaatgcttgcgcacttactcatattgaggaagcactcatgtggatgaatcgtagagtagaagatcgcattgaaagaaatgttcttggaaagaacgaaaaatag

SEQ ID NO: 69 - DNA, 402 bp, synthetic construct
  misc_feature 1..402: note = TAD1 homologous NA sequence
  source 1..402: mol_type = other DNA
atgaaacagttatcaacaattcagaaaagagaaaaattaaatgatgtgtttgctgtagacgaaattggtccaggcggtgctaatcacttatattgtgtgtacaaggctggaacagcaacgcttgaagatgatgatacatcgttaagagcggaaccggataatctgcttcttacattacagatgcagtgcggaccacgaaaagaaaaagattcgcttcacggtgtaatcgacacagatttactggaaattgtacgtgatcgcttaaaagcttttcaggcaggaccgttttcgtcaagagaaaatgcttgcgcacttactcatattgaggaagcgctcatgtggatgaaccgtagagtagaagatcgcattgaaagaaatgttcttggaaagaacgaaaagtag

SEQ ID NO: 70 - DNA, 369 bp, synthetic construct
  misc_feature 1..369: note = TAD1 homologous NA sequence
  source 1..369: mol_type = other DNA
atgaaagaactaaataccattcaaaaaaaagaaaagctaaacgaggtttatgtattggataataagggcccaggtggagccaatcatgtttatatgatatgtaaaaaagataaagatattttagacagtgtactagtagatataaattttcaaaaaggacctcgtaaagaaggaagttcaactaatggtatagctaatgaagatttattagaaatagtaagacatagtcttcaatcgtttcaagctggaccatttagttcaagggaaaatgcttgtgcattaactcatatagaagaagctttaatgtggcttaatagaagagttgaggataggatagagagaaatgttttaggtacaaataataaataa

SEQ ID NO: 71 - DNA, 369 bp, synthetic construct
  misc_feature 1..369: note = TAD1 homologous NA sequence
  source 1..369: mol_type = other DNA
atgaaagaactaaataccattcaaaaaagagaaaagctaaatgatgtatatgttttagatgaaaaaggtaatggtggggcacatcatatttacatgatatgcaaacacaataaagatattacagataatgtacttgtagatataaactttcaaaatggtcctagaaatgaggaaagtttaacttatggaatactcgatactgacctgttagaaatagtaagacatagattgcaatgttttcaagcagggccttattcaagtagagaaaatgcttgtgcattaacacatatagaagaggctttaatatggcttaatagacgtgttgaaaacagaatatatagaaatgttttaggtacaaataataaataa

SEQ ID NO: 72 - DNA, 303 bp, synthetic construct
  misc_feature 1..303: note = TAD1 homologous NA sequence
  source 1..303: mol_type = other DNA
atgaaagaattaaaaatggacttattgacaagcaaatataccaaagttatgcaggaggaggagttttcttataacgctccacaccgcttttctgttgtcaaagcagattcaggagaaccgcttgcggatattcactttcaagaaggaccgattcaggaatgcggagtaaacggtgtatgcaatgaagatttaatcaacatggttatttgccgccttgagcacttccagcagtccgaacatagatgcagggaaaatgcccttgctattacctctctggaagaagctcttctttggttgagaaaa

SEQ ID NO: 73 - DNA, 354 bp, synthetic construct
  misc_feature 1..354: note = TAD1 homologous NA sequence
  source 1..354: mol_type = other DNA
atgaaagaattaaaaatggacttattgacaagcaaatataccaaagttatgcaggaggaggagttttcttataacgctccacaccgcttttctgttgtcaaagcagattcaggagaaccgcttgcggatattcactttcaagaaggaccgattcaggaatgcggagtaaacggtgtatgcaatgaagatttaatcaacatggttatttgccgccttgagcacttccagcagtccgaacatagatgcagggaaaatgcccttgctattacctctctggaagaagctcttctttggttgagaaaaagaactattgcaagagaaaacaggggtgttgaaggaactcacaacgtataa

SEQ ID NO: 74 - DNA, 366 bp, synthetic construct
  misc_feature 1..366: note = TAD1 homologous NA sequence
  source 1..366: mol_type = other DNA
atgaaagaattaaacacaatccaaaagagagaaaaattaaatagagtatttgcctgtgatgaagcaggtcctggtggagctagtcatgaatatggaataatgtctgataagggattacaagtacccaaagaacaggtaataacatttcaaaaaggtcctagaaatgtagaaggtagtcaacatggtgcaacaaatgaagatttattagaaatagtaagagatagattaaagtcattccaagccggaccattctccagtagggaaaatgcatgtgcattgactcatatcgaagaagctttaatgtggatgaacagaagagtagaagatagaattgaaagaaatgtattaggaagaaatgaaaaataa

SEQ ID NO: 75 - DNA, 387 bp, synthetic construct
  misc_feature 1..387: note = TAD1 homologous NA sequence
  source 1..387: mol_type = other DNA
atgaaagaattaaacactattcaaaagagagaaaaattaaatgatgtttattctatagacacaaagggaaatggaggagctaatcacgaatatttagtatgccaacatggaaaaacttcatggtgtaatggaaataattcagaattagtatatgcagaaatacaatttcaaaacggtccaagaaatgaatctaattcaattcatggtgtagctaatgaggatttattagaaatagtaagagatagattaaagtcattccaagctggaccattttccagtagagaaaatgcatgtgcattaactcatattgaagaagctttaatgtggatgaacagaagggcagaagatagaattgaaagaaatgtattagggaaaaatgaaaaataa

SEQ ID NO: 76 - DNA, 369 bp, synthetic construct
  misc_feature 1..369: note = TAD1 homologous NA sequence
  source 1..369: mol_type = other DNA
atgaaagaattaaataccattcaaaaaagagaaaaactaaacgaggtttatgcactggatgataagggtccaggtggagctaaccacgtatatatgatttgtaaaaaaggtgaagaaattttagatagtgtgttagtagatatacaatttcaaaaaggacctcgtaaagaagttagtgcatcaaatggtgtattagacacagatttattagaaatagtaagacatagattgcaatgttttcaagcaggaccttattcaagcagagaaaatgcttgtgcattaactcatatcgaagaagctttaatgtggcttaatagacgtgttgaagatagaatagagcgtaatgttttagggacaaataataaataa

SEQ ID NO: 77 - DNA, 369 bp, synthetic construct
  misc_feature 1..369: note = TAD1 homologous NA sequence
  source 1..369: mol_type = other DNA
atgaaagaattaaataccattcaaaaaagagaaaagttaaacgaggtttatgtattggatgataagggtttaggtggagtcaatcatgtttatatgatatgtaaaaaagataaagatattttagacagtgtactagtagatataaattttcaaaaaggtcctcgtaaagaaggaagttcaaccaatggtatactagatacagatttattagaaatagtaagacatagattacaaggttttcaagaaggtccttattcaagcagagaaaatgcttgcgctttaactcatatagaagaggctttaatgtggcttaatagaagagttgaagatagaatagagagaaatgttctaggaactaataataagtag

SEQ ID NO: 78 - DNA, 360 bp, synthetic construct
  misc_feature 1..360: note = TAD1 homologous NA sequence
  source 1..360: mol_type = other DNA
atgaaagaattaagtacaatccaaaagagagaaaaattaaatactgttaatataaaaggtgaggtgggtccaggaggtgcttatcataaatataatataatatctaatgataatggaatattacttggaagtgtgcaatttcaaatgggtcctagaaatgaaactaattcaatagccggagtgattgattctgatttacttgaaatagtaagagatagattacaatgttttcaaactgggccatttagttcaagggaaaatgcaattgcactaactcatattgaagaagctttaatgtggatgaacagaagggtagaagatagaattgaaagaaatgtattgggaaggaatgagaaataa

SEQ ID NO: 79 - DNA, 366 bp, synthetic construct
  misc_feature 1..366: note = TAD1 homologous NA sequence
  source 1..366: mol_type = other DNA
atgaaagaattaagtacaatccaaaagagagaaaaattaaatagagtatttgcctgtgatgaagcaggtcctggtggagctagtcatgaatatggaataatgtctgataagggattacaagtgcctaaagaacaggtaataacatttcaaaaaggtcctagaaatgtagagggtagtcaacatggtgcttgtgatgaagatttattagaaatggtaagggatagattaaaagccttccaaagaggtccttattcttgtagagaaaatgcctgtgcattaacacatatagaagaagccttactttggttaaatatgcgtaaggaagatagaattgaaagaaatgtattagggaaaaatgaaaaataa

SEQ ID NO: 80 - DNA, 387 bp, synthetic construct
  misc_feature 1..387: note = TAD1 homologous NA sequence
  source 1..387: mol_type = other DNA
atgaaagaattaagtacaatccaaaagagagaaaaattaaatgatgtttattctatagacacaaaaggcaacggaggagctaatcacgaatatttaatatgccaacatggaaaaacttcatggtgtaatggaaataattcagagttagtatatgcagaaatacaatttcaaaacggtccaagaaatgaatctaattcaattcttggtgtaactaatgaagacttattagaaatagtgagagatagacttaaatcttttcaagctggaccatttagttcaagggaaaatgcttgtgctttaacacatattgaagaagctttaatgtggataaatagaagagttgaggatagaattgaaagaaatgttttaggaaggaatgagaaataa

SEQ ID NO: 81 - DNA, 387 bp, synthetic construct
  misc_feature 1..387: note = TAD1 homologous NA sequence
  source 1..387: mol_type = other DNA
atgaaagaattaagtacaatccaaaagagagaaaaattaaatgatgtttattctatagacacaaaaggcaacggaggagctaatcacgaatatttaatatgccaacatggaaaaacttcatggtgtaatggaaataattcagagttagtatatgcagaaatacaatttcaaaacggtccaagaaatgaatctaattcaattcttggtgtaactaatgaagacttattagaaatagtgagagatagacttaaatcttttcaagctggaccatttagttcaagggaaaatgcttgtgctttaacacatgttgaagaagctttaatgtggatgaatagaagagtagaagatagaattgaaagaaatgtattaggaaggaatgaaaaataa

SEQ ID NO: 82 - DNA, 387 bp, synthetic construct
  misc_feature 1..387: note = TAD1 homologous NA sequence
  source 1..387: mol_type = other DNA
atgaaagaattaagtacaatccaaaagagagaaaaattaaatgatgtttattctatagacacaaagggcaatggaggagctaatcacgaatatttaatatgccaacatggaaacacttcatggtgcaatggaaataattcagaattagtatatgcagaaatacaatttcaaaacggtccaagaaatgaatctaattcaattcatggtgtaactaatgaagatttattagaaatagtaagagatagattaaaggcatttcaagctggaccattctccagtaaagaaaatgcatgtgcattaactcatattgaagaagcattaatgtggatgaatagaagagtagaagatagaattgaaagaaatgtactaggaagaaatgaaaaataa

SEQ ID NO: 83 - DNA, 375 bp, synthetic construct
  misc_feature 1..375: note = TAD1 homologous NA sequence
  source 1..375: mol_type = other DNA
atgaaagaattaagtacaatccaaaagagagagaaattaaatacagttatgtgtgtagataatgaaggtccaggaggtgcacatcataaatatttaattcaaagtaaagaaagagatttaaatggaactcctttgtttttaggggaaattcagttacaatgtggaccacgtaaagatgaaaattcaattcatggtgtaattgatacagatttattagaaatagtaagagatagattaaaagccttccaaagaggtccttattcttgtagagaaaatgcctgtgcattaacacatatagaagaagccttactttggttaaatatgcgtaaggaagatagaattgaaagaaatgtattagggaaaaatgaaaaataa

SEQ ID NO: 84 - DNA, 375 bp, synthetic construct
  misc_feature 1..375: note = TAD1 homologous NA sequence
  source 1..375: mol_type = other DNA
atgaaagaattaagtacaattcaaaaaagagagaaattaaacactgttgaaagaataggaagcgaaggtccaggaggtgcatatcatgaatatgtaattaaaagtaattctatggatacccaagggaattatgatgtttatgaaataattaaatttcaaaaaggtccaagaaatgaagatggttcaattcatgctgtaattgatactgacctattagaaatagtaagagatagattgaagtcattccaagctggaccattctccagtagagaaaatgcatgtgcattaactcatattgaagaagccttaatgtggatgaatagaagggtagaggacagaattgaaagaagtgtattcggaaggaatgaaaaataa

SEQ ID NO: 85 - DNA, 375 bp, synthetic construct
  misc_feature 1..375: note = TAD1 homologous NA sequence
  source 1..375: mol_type = other DNA
atgaaagaattaagtacaattcaaaaaagagagaaattaaacactgttgaaagaataggaagcgaaggtccaggaggtgcatatcatgaatatgtaattaaaagtaattctatggatagtcaagggaattatgatgtttatgaaactatcaagttccaaaaaggtgctagaaaagaagagaaatcacaacacggtgtaatagattctgacttattagaaatagtaagagatagattaaagagttttcaagctggaccattctcaagtagagaaaatgcttgtgctttaacacatgttgaagaagctttaatgtggatgaatagaagggtagaggacagaattgaaagaaatgtattaggtacaaatactaagtag

SEQ ID NO: 86 - DNA, 381 bp, synthetic construct
  misc_feature 1..381: note = TAD1 homologous NA sequence
  source 1..381: mol_type = other DNA
atgaaagaattaagtacaattcaaaagagagaaaaattaaatcaagtttttgcagcagatggagaaggcccaggaggtgcgcatcatgaatatagaattcaatatgaattgtttcccgttggaaaatctaaagagactcatattatttcaaagatacaatttcaaaaaggaccaagaaaagaaaaagattcgactcatggtgtaattgacactgacctattagaaatagtaagagacagattaaagtcatttcaagctggaccatttgcaagtagagaaaatgcatgtgcattaactcatattgaagaggctttaatgtggatgaatagaagagttgaagacaggatagaaagaaatgttcttggtaaaaatgaaaagtaa

SEQ ID NO: 87 - DNA, 378 bp, synthetic construct
  misc_feature 1..378: note = TAD1 homologous NA sequence
  source 1..378: mol_type = other DNA
atgaaagaattagccactattcaaaaaagagaaaaactaaatgaagtctggacaatagatgaaaaaggaccaggaggagcacatcataactatataatagtaagcaatgaagttaactttaaaaatcaacaacctttatttgctactgaaatacaattccaaaagggcgcaagaaaagaagaaagttcaacacatggtgttatagatacagacctattagaaatagtaagagataggttaaagtcttttcaatcagggcaatattcatcaagagaaaatgcatgtgcattaactcatatagaagaagctttgatgtggcttaatcgaagagtagaagacagaattgaaagagatgtattagggacaaataataaataa

SEQ ID NO: 88 - DNA, 354 bp, synthetic construct
  misc_feature 1..354: note = TAD1 homologous NA sequence
  source 1..354: mol_type = other DNA
atgaaagagctgaaaagagatttgctccgcacgaagtacaccaaggtaatggtcgaagaggagtacaagtacaatgcgccgcacaactttgaggtacggcgggtcgaagacgatgccatcgtatgcagcatccattttcaagaaggccccgtcctcgaatgcggctccaacggcgtcggaaacgaagacctcatcaacatggtcgtcgaacggctcgaatgcttccagaaaagtgagttcgcttgcagggagaatgcaatcgccatcacgaagctggaagaggcgctgctctggctgcggaagagaacagaggcaagagtacagcgcggtgtagaaggtacacataccgtttga

SEQ ID NO: 89 - DNA, 672 bp, synthetic construct
  misc_feature 1..672: note = TAD1 homologous NA sequence
  source 1..672: mol_type = other DNA
atgaaagcgacaaagaaacccgtaaccatcgaatgcttcaagtacgatggcgacctcaagaacggcaacggcgaatactacgttcccgaatgggccgtggaagccgaaaagaacggtactatcttcttcaaggaccagggagaaatgtacatcaagacgctcgaaggcgaccgccacgcaagcgtcggcgactacatcatccgtggcgtgaacggcaaactgtgcccctgcaagccggacatcttcgagaagacgtacgacattgtggactccggcaaccgtgtgcgcgaattcaaggagaccaagcacaacctcctcacgaccaagtacacgaaggtcctggaagagtccgagtaccaatacaacgccccgcacaccttccgggttatcaaggcacaggaagaaacctccgaagaacacaagggcgagaacctcgtgctctccgagatccacttccaggaaggccccatcaaggaatgcggcgtgaatggcgtctgcaacgaagatctcctcgtgatggttatccgtcgccttcagggattccaggaatccaaatacaagtgccgcgaaaacgccatggcgattaccaaaatcgaggcggctttgctgtggctgcgtaagagaacgatggcctgtgaaaatcgcggagttgaagggacgcacatggtgtaa

SEQ ID NO: 90 - DNA, 420 bp, synthetic construct
  misc_feature 1..420: note = TAD1 homologous NA sequence
  source 1..420: mol_type = other DNA
atgaaagttgaatattttgataaggattttgattctgaaaattatccatttgaaaggctatctggtcaaaaaatatctaccattcaaaaacgcaacaatctaaacgttgtattaaggcgtggagattccggccctggtggcgcctatcatgaatacgttattatcggaaccaacggatttgcaatcaccaatattcgtttccaaaaaggaccgcgaaacgctcctagttctgaaactggagcattggacgttgatctccttgaaatagtgcgcgaccggcttagttgctttcaaaaaggcgatatgccgacgcgggaatccgcgattgcgctcacgcatgttgaagaagctctgctttggctgaacaagcgcacagaggatcgtgccgaacgcaacgtccttgggaccatggaaaaataa

SEQ ID NO: 91 - DNA, 384 bp, synthetic construct
  misc_feature 1..384: note = TAD1 homologous NA sequence
  source 1..384: mol_type = other DNA
atgaaattatcaaccattcaaaaaagagaaaaattaaacgatgtatatgctatggatgaaaagggagtaggaggagtaaatcatagatatgtaatttgcaagaatggttcacaagagtggcaacaaggttcaaattcggataatgtatatgccgatatacaacttcaaaatggggctagaaaagaagatgattcaattcatggcgtaattgatactgatttacttgaaatagtaaggcatagacttcaatgttttcaagctggaccattttcgtcaagagaaaatgcatgtgcattaactcatattgaagaagctcttatgtggatgaatagaagagttgaggatagaattgaaagaaatgtattgggaaggaatgaaaaataa

SEQ ID NO: 92 - DNA, 330 bp, synthetic construct
  misc_feature 1..330: note = TAD1 homologous NA sequence
  source 1..330: mol_type = other DNA
atgaacaaaccaagctataacgcactagaagaattgcacaacgagctgaatcgcggcacgccaggtgatgaagtttctcttaatatcggcggcaaagaggtgctgaaaatcaagtttcaaactggcggtacagctaccacagaacgcaacggtgtatttattgaagacttgcttattatcgcttacgcaaaattagcaggctacaaccgagggctgccttgtcgcgaaaacagtgtggctcttacaaaaattgaggaagctattatgtggttggctaaccgtaaggctgagcgtgaagctcgcggtgtgtatggcactgaggaaaaataa

SEQ ID NO: 93 - DNA, 330 bp, synthetic construct
  misc_feature 1..330: note = TAD1 homologous NA sequence
  source 1..330: mol_type = other DNA
atgaacaaaccaagctataacgcactagaagaattgcacaacgagctgaatcgcggcacgccaggtgatgaagtttctcttaatatcggtggcaaagaggtgctgaaaatcaagtttcaaactggcggcacggctactacagagcgtaacggtgtatttatcgaggacttgcttattatagcttacgcaaaactagcaggctacaatcgagagttgccttgccgcgaaaacagtgtggctcttacaaaaatcgaggaagctattatgtggctggctaaccgtaaggctgagcgtgaagctcgcggtgtgtatggcactgaggaaaaataa

SEQ ID NO: 94 - DNA, 414 bp, synthetic construct
  misc_feature 1..414: note = TAD1 homologous NA sequence
  source 1..414: mol_type = other DNA
atgaacaattctgaacacgaaactcaaggccatgcgtcagaaagtatagtttttggcacagacattcatgaagatcataatggcgttgtagtaacgcacaatgagcagattcaagttgagaattcagaaaaacgtcatgaattaagtcatggtcattattacgatattttgtctggtgagttagttacaccaattcaatttcaacatggtccagttaaggaacatggggtgaatggtataactagtgaagcgcttttagccattttgattcatcggactaaaattttgaacaataactttccatgtgaagaaaataagcgagcgataacttacatggaaaatgcactagcactttttgaacagcgtacacgtgatcgacaacaacgtggtgttgagggcttaaatcaagcctaa

SEQ ID NO: 95 - DNA, 357 bp, synthetic construct
  misc_feature 1..357: note = TAD1 homologous NA sequence
  source 1..357: mol_type = other DNA
atgaagaaattagagtatgatttgttaacaagtaagtacacagaggtgcatcacgaagagggatttaactttaatgcacctaattattttgaagttagagacagccaagaacaattaaatattttagctaagattaattttcaatcaggtccaattaaaaaatatggtgtgaatggtgtaaataatgaagatttaatctctatggttatttgcagattagcacactttcaaaaatcagagtttgcttgtcgagaaaatgaaaaagcaatcgaaaaattagaagaagctcttttatggctaagaaaacgaacaatgggaagggaagcaagaggggtagaaggtacacatcaaaaataa

SEQ ID NO: 96 - DNA, 402 bp, synthetic construct
  misc_feature 1..402: note = TAD1 homologous NA sequence
  source 1..402: mol_type = other DNA
atgaagaaattatcaacaattcaaaagagagaaaaacttaatgatgtatttgcagtagatgagattggatcgggtggggcaaatcatttatatcttgtgtacaaggctggttctgcaactcttgaagataatgatacatctctaagaggaaagccggaggacttacttcttacattacagatgcagtgcggaccacgaaaagaaaaagattcgcttcacggtgtaatcgacacagatttactggaaattgtacgtgatcgcttaaaagcttttcaggcaggaccgtttgcgtcaagagaaaatgcttgcgcacttactcatatcgaggaagctctcatgtggatgaatcgtagagtagaagaccgcattgaaagaaatgttcttggaaagaacgaaaagtag

SEQ ID NO: 97 - DNA, 402 bp, synthetic construct
  misc_feature 1..402: note = TAD1 homologous NA sequence
  source 1..402: mol_type = other DNA
atgaagaaattatcaacaattcaaaagagagaaaaacttaatgatgtatttgcagtagatgagattggatcgggtggggcaaatcatttatatcttgtgtacaaggctggttctgcaactcttgaagataatgatacatctctgagaggaaagccggaggacttacttcttacattacagatgcagtgcggaccacgaaaagaagagaattcacttcacggagtaattgacacagacttactggaaattgtacgtgatcgcttaaaagcttttcaggcaggaccgtttgcgtcaagagaaaatgcttgcgcgcttactcatatcgaggaagctctcatgtggatgaatcgtagagtagaagaccgcattgaaagaaatgttcttggaaagaacgaaaagtag

SEQ ID NO: 98 - DNA, 402 bp, synthetic construct
  misc_feature 1..402: note = TAD1 homologous NA sequence
  source 1..402: mol_type = other DNA
atgaagaaattatcaacaattcagaaaagagaaaaattaaatgatgtatttgccgtagataaaatcggtccaggtggtgctaatcacttatattgtgtgtacaaggctggaacagcaacgcttgaagatgatgatacatcgttaagagcggaaccggataatctgcttcttacattacagatgcagtgcggaccacgaaaagaaaaaaattcgcttcacggtgtaatcgacacagatttactggaaattgtacgtgatcgcttaaaagcttttcaggcaggaccgtttgcgtcaagagaaaatgcttgcgcgcttactcatatcgaggaagctctcatgtggatgaatcgtggagtagaagaccgcattgaaagaaatgttcttggaaagaacgaaaaatag

SEQ ID NO: 99 - DNA, 402 bp, synthetic construct
  misc_feature 1..402: note = TAD1 homologous NA sequence
  source 1..402: mol_type = other DNA
atgaagaaattatcaacaattcagaaaagagaaaaattaaatgatgtatttgctgtagatgaaatcggcccaggtggtgctaaccacttatattgtgtgtacaaggctggaacagcaacgcttgaagatgatgatacatcgttaagagcggaaccggagaatctgcttcttacattacagatgcagtgcggaccacgaaaagaaaaagattcgcttcacggtgtaatcgacacagatttactggaaattgtccgtgatcgcttaaaagcttttcaggcaggaccgttttcgtcaagagaaaatgcttgtgcacttactcatatcgaggaagctctcatgtggatgaatcgtagagtagaagatcgcattgaacgaaatgttcttggaaagaacgaaaaatag

SEQ ID NO: 100 - DNA, 402 bp, synthetic construct
  misc_feature 1..402: note = TAD1 homologous NA sequence
  source 1..402: mol_type = other DNA
atgaagaaattatcaacaattcagaaaagagaaaaattaaatgatgtatttgctgtagatgaaatcggcccaggtggtgctaaccacttatattgtgtgtacaaggctggaacagcaacgcttgaagatgatgatacatcgttaagagcggaaccggagaatctgcttcttacattacagatgcagtgcggaccacgaaaagaaaaagattcgcttcacggtgtaatcgacacagatttactggaaattgtccgtgatcgcttaaaagcttttcaggcaggaccgttttcgtcaagagaaaatgcttgtgcacttactcatattgaggaagctcttatgtggatgaatcgtagagtagaagatcgcattgaaagaaatgttcttggaaagaacgaaaaatag

SEQ ID NO: 101 - DNA, 402 bp, synthetic construct
  misc_feature 1..402: note = TAD1 homologous NA sequence
  source 1..402: mol_type = other DNA
atgaagaaattatcaacaattcagaaaagagaaaaattaaatgatgtatttgctgtagatgaaatcggcccaggtggtgctaaccacttatattgtgtgtacaaggctggaacagcaacgcttgaagatgatgatacatcgttaagagcggaaccggagaatctgcttcttacattacagatgcagtgcggaccacgaaaagaaaaagattcgcttcacggtgtaatcgacacagatttactggaaattgtccgtgatcgcttaaaggcttttcaggcaggaccgttttcgtcaagagaaaatgcttgtgcacttactcatattgaggaagcactcatgtggatgaaccgtagagtagaagatcgcattgaaagaaatgttcttggaaagaacgaaaagtag

SEQ ID NO: 102 - DNA, 402 bp, synthetic construct
  misc_feature 1..402: note = TAD1 homologous NA sequence
  source 1..402: mol_type = other DNA
atgaagaaattatcaacaattcagaaaagagaaaaattaaatgatgtatttgctgtagatgaaatcggcccaggtggtgctaaccacttatattgtgtgtacaaggctggaacagcaacgcttgaagatgatgatacattgttaagagcggaaccggagaatctgcttcttacattgcagatgcagtgcggaccacgaaaagaaaaagattcgcttcacggtgtaatcgacacagatttactggaaattgtccgtgatcgcttaaaagcttttcaggcaggaccgttttcgtcaagagaaaatgcgtgtgcacttactcatattgaggaagctcttatgtggatgaatcgtagagtagaagatcgcattgaaagaaatgttcttggaaagaacgaaaaatag

SEQ ID NO: 103 - DNA, 402 bp, synthetic construct
  misc_feature 1..402: note = TAD1 homologous NA sequence
  source 1..402: mol_type = other DNA
atgaagcaattaaacacaattcagaaaatggaaaagctcaatgacgtattcgccattgatgaggttggacctgggggcgcgcaccacttataccaggtatgcaagctcaacacaggacgcatctctgatgaggacaacactttccgtacaagaccggaaaatatgcttgcaacaatccagatgcagtgtggcgcgagaaaagatcctgacgcaatcagcggtgttattgattctgacttactggaaattgtcagagacagactttccgctttccagcagggtccttatccatcctacgaaacagctcaggcgttataccatgttgaggaagcgcttatgtggctcaatcgtagagttgaagatcgcgcaacgcgcggagtattaggaactgaaacaaaatag

SEQ ID NO: 104 - DNA, 402 bp, synthetic construct
  misc_feature 1..402: note = TAD1 homologous NA sequence
  source 1..402: mol_type = other DNA
atgaagcaattaaacacaattcagaaaatggaaaagctcaatgatgtattcgccattgatgaggttggacctggaggcgcgcaccacttataccaggtatgcaagctcaacacaggacgcatctctgatgaggacaacactttccgtacaagaccggaaaatatgcttgcaacaatccagatgcagtgtggcgcgagaaaagatcctgatgcaatcagcggtgttattgattctgacttactggaaattgtcagagacagactttccgctttccagcagggtccttatccatcctacgaaacagctcaggcgttataccatgttgaggaagcgcttatgtggctcaatcgtagagttgaagatcgcgcaacgcgcggagtattaggaactgaaacaaaatag

SEQ ID NO: 105 - DNA, 402 bp, synthetic construct
  misc_feature 1..402: note = TAD1 homologous NA sequence
  source 1..402: mol_type = other DNA
atgaagcaattaaacacaattcagaaaatggaaaagctcaatgatgtattcgccattgatgaggttggacctggaggcgcgcaccacttataccaggtatgcaagctcaacacaggacgcatctctgatgaggacaacactttccgtacaagaccggaaaatatgcttgcaacaatccagatgcagtgtggcgcgagaaaagatcctgatgcaatcagcggtgttattgattctgacttactggaaattgtcagagacagactttccgctttccagcagggtccttatccatcctacgaaacagctcaggcgttataccatgttgaggaggcgcttatgtggctcaatcgtagagttgaagatcgcgcaacgcgcggagtattaggaactgaaacaaaatag

SEQ ID NO: 106 - DNA, 402 bp, synthetic construct
  misc_feature 1..402: note = TAD1 homologous NA sequence
  source 1..402: mol_type = other DNA
atgaagcaattatcaacaattcagaaaagagaaaaattaaatgatgtgtttgccgtagatgaaattggtccaggtggtgccaatcacttgtattgtgtttgcaaggctgggacagcaacacttgaagatgatgatacatcgttaagagcggaaccggataatctgcttcttacattacagatgcagtgcggaccacgaaaagaaaaagattcgcttcatggtgtaatcgacacagatttactggaaattgtacgtgatcgcttaaaagcttttcaggcaggaccgtttgcgtcaagagaaaatgcttgcgcgcttactcatatcgaggaagctctcatgtggatgaatcgtagagtagaagaccgcattgaaagaaacgttcttggaaagaacgaaaagtag

SEQ ID NO: 107 - DNA, 354 bp, synthetic construct
  misc_feature 1..354: note = TAD1 homologous NA sequence
  source 1..354: mol_type = other DNA
atgaaggaacttaaaagagacctgctcagagcaaaattcacgcgcgtgatggtcgaggaaaactacaagtacaacgcgccgcacaacttcgaggtgcgccgcgtcgaggatgatgcgctcgtctgcaaaatccatttccaggaggggcctgtgcatgagtgcggctccaacggcgtggggaacgaggacctgatcaacatggtcgtggagcggctcgaatgtttccagcgcagcccgtatgcatgccgcgagaacgagatcgccatcacgaagctggaggaggcgctgctctggctgcgcaagcgaacggagggccgcgtgcagcgcggcatcgaggggacgagtaagctctaa

SEQ ID NO: 108 - DNA, 354 bp, synthetic construct
  misc_feature 1..354: note = TAD1 homologous NA sequence
  source 1..354: mol_type = other DNA
atgaaggaacttaaaagagacctgctcaggacaaaattcacgcgcgtgatggtcgaggaaaactacaagtacaacgcgccgcacaacttcgaggtgcggcgcgtcgaggatgatgcgctcgtctgcaaaatccatttccaggaggggcctgtgcatgagtgcggctccaacggcgtggggaacgaggacctgatcaacatggtcgtggagcggctcgaatgtttccagcgcagcccgtatgcatgccgcgagaacgagatcgccatcacgaagctggaggaggcgctgctctggctgcgcaaacggacggagggccgcgtgcagcgcggcgtcgaggggacaagtaagctctaa

SEQ ID NO: 109 - DNA, 354 bp, synthetic construct
  misc_feature 1..354: note = TAD1 homologous NA sequence
  source 1..354: mol_type = other DNA
atgaaggaacttaaaagagacctgctcaggacaaaattcacgcgcgtgatggtcgagggaaactacaagtacaacgcgccgcacaacttcgaggtgcggcgcgtcgaggatgatgcgctcgtctgcaaaatccatttccaggaggggcctgtgcatgagtgcggctccaacggcgtggggaacgaggacctgatcaacatggtcgtggagcggctcgaatgtttccagcgcagcccgtatgcgtgccgcgagaacgagatcgccatcacgaagctggaggaggcgctgctctggctgcgcaaacggacggagggccgcgtgcagcgcggcgtcgaggggacgagtaagctctaa

SEQ ID NO: 110 - DNA, 354 bp, synthetic construct
  misc_feature 1..354: note = TAD1 homologous NA sequence
  source 1..354: mol_type = other DNA
atgaaggaacttaaaagagacctgctcagggcaaaattcacacgcgtaatggtagaagaagactacaagtacaacgcgccgcacaacttcgaggtgcgccgcgtcgaggatgatgcgctcgtccgcaaaatccatttccaggaggggcctgtgcatgagtgcggctccaacggcgtggcgaacgaggacctgatcaacatggtcgtggagcggctcgaatgtttccagcgcagcccgtatgcgtgccgcgaaaaccagatcgccattacgaaactggaagaggcgctcctctggctgcgcaagcgaacggagggccgcgtgcagcgcggcatcgaggggacgagtaagctctaa

SEQ ID NO: 111 - DNA, 354 bp, synthetic construct
  misc_feature 1..354: note = TAD1 homologous NA sequence
  source 1..354: mol_type = other DNA
atgaaggaacttaaaagagacctgctcagggcaaaattcacgcgtgtgatggtagaagaagactacaagtacaacgcgccgcacaacttcgaggtgcgccgcgtcgaggatgatgcgctcgtctgcaaaatccatttccaggaggggcctgtgcatgagtgcggaatcaacggcgtcaacaacgaggatctgatcaacatggtcgtggagcggctcgaatgtttccagcgcagcccgtatgcgtgccgcgaaaaccagatcgccatcacgaagctggaagaagcgctcctctggctgcgcaagcgaacggagggccgcgtgcagcgcggcgtcgaagggacaagcaagctctaa

SEQ ID NO: 112 - DNA, 354 bp, synthetic construct
  misc_feature 1..354: note = TAD1 homologous NA sequence
  source 1..354: mol_type = other DNA
atgaaggaacttaagagagatttgctcagagcaaaattcacgcgcgtgatggtcgaggaaaactacaagtacaacgcgccgcacaacttcgaggtgcgccgcgtcgaggatgatgcgctcgtctgcaaaatccatttccaggaggggcctgtgcatgagtgcggctccaacggcgtggggaacgaggacctgatcaacatggtcgtggagcggctcgaatgtttccagcgcagcccgtatgcatgccgcgagaacgagatcgccatcacgaagctggaagaggcgctgctctggctgcgcaagcgaacggagggccgcgtgcagcgcggcatcgaggggacgagtaagctctaa

SEQ ID NO: 113 - DNA, 354 bp, synthetic construct
  misc_feature 1..354: note = TAD1 homologous NA sequence
  source 1..354: mol_type = other DNA
atgaaggaacttaagagagatttgctcagagcaaaattcacgcgcgtgatggtcgaggaaaactacaagtacaacgcgccgcacaacttcgaggtgcgccgcgtcgaggatgatgcgctcgtctgcaaaatccatttccaggaggggcctgtgcatgagtgcggctccaacggcgtggggaacgaggacctgatcaacatggtcgtggagcggctcgaatgtttccagcgcagcccgtatgcatgccgcgagaacgagatcgccatcacgaagctggaggaggcgctgctctggctgcgcaagcgaacggagggccgcgtgcagcgcggcattgaggggacgagtaagctctaa

SEQ ID NO: 114 - DNA, 390 bp, synthetic construct
  misc_feature 1..390: note = TAD1 homologous NA sequence
  source 1..390: mol_type = other DNA
atgaataaagaaccaggaactgaaaagcaatttactgaagttgagcatgaactattaggtggcgtgtacacaaaggtatttcatgaaacagagttcacatcacacgcacctcactatttcaaagtagaacgtacagaaggcgaaggaaacaacgtagtaggcggagtacacttccaagaaggtactgtaaaagaagcaggcgttaatggagtattcaatgaagacttaatcgctatgattcttactcgtttacagttcttccaaggcactcagttcgcttgtcgtgaaaacgctatggcaattacgaaattagaagaagcgttaatgtggttaaacaaacgtactactgatcgtagaaatcgtggcgtagagggaacttacaaaaaatag

SEQ ID NO: 115 - DNA, 390 bp, synthetic construct
  misc_feature 1..390: note = TAD1 homologous NA sequence
  source 1..390: mol_type = other DNA
atgaataaagaaccaggaactgaaaagcaatttactgaggtagaacacgaactattaggtggcgtatacacaaaggtatttcatgaaacagagttcacatcacatgcacctcactatttcaaagtagaacgtacagaaggcgaaggaaataatgtagtaggcgctgtacacttccaagaaggtactgtaaaagaagcaggagttaacggagtattcaatgaagacttaatcgctatgattcttactcgtttacagtttttccaaaacactaagtttgcttgtcgtgaaaacgctatggcaattacgaaattagaagaagcgttaatgtggttaaacaaacgtacgactgatcgtagaaatcgtggcgtagaaggaacttacaaaaagtag

SEQ ID NO: 116 - DNA, 321 bp, synthetic construct
  misc_feature 1..321: note = TAD1 homologous NA sequence
  source 1..321: mol_type = other DNA
atgaataaatcaaactataacgcactaaacgaattacacaacacccttaggtgcggcgtgccagctgacgaatattcacaaggtataaatgataaagaggtgttgaagattatatttgagagtagcgaaggcaaacgcgatggcgtatctatcgaagatttgctgactgtcgcctacgcaaagttggcaagttataaccgagaattgccttgccgcgaaaacagtgtagcccttacgaaaatcgaggaggctatcatgtggctagctaaccgtaaggctgagcgtgaagctcgcggcgtatatggcactgaggaaaaataa

SEQ ID NO: 117 - DNA, 321 bp, synthetic construct
  misc_feature 1..321: note = TAD1 homologous NA sequence
  source 1..321: mol_type = other DNA
atgaataaatcaaactataacgcactaaacgaattacacaacactcttaggtgcggcgtaccagccgacgaatattcgcagggtatcaatgacgaagaggttttgagaatcaaatttgcaagtagcgaaggcaaacgcgatggcgtatctatcgaagatttactgactgtcgcctacgcaaagctggcaagttataaccgagaattaccatgccgcgaaaacagtatagcccttacgaaaatcgaggaggctatcatgtggctagctaaccgtaaggctgagcgtgaagctcgcggtgtgtatggcactgaggaaaaataa

SEQ ID NO: 118 - DNA, 321 bp, synthetic construct
  misc_feature 1..321: note = TAD1 homologous NA sequence
  source 1..321: mol_type = other DNA
atgaataaatcaaactataatgcactaaacgaattacacaacactcttaggtgcggcgtgccagctgacgaatattcacaaggcataaatgataaagaggtgttgaagattatatttgagagcagcgaaggcaaacgcgatggcgtatctatcgaagatttactgactgtcgcctacgcaaagctggcaagttataaccgagaattaccatgccgcgaaaacagcgtggcactcacgaagattgaggaagctatcatgtggctagctaaccgtaaggctgagcgtgaagctcgcggcgtatatggcactgaggaaaaataa

SEQ ID NO: 119 - DNA, 321 bp, synthetic construct
  misc_feature 1..321: note = TAD1 homologous NA sequence
  source 1..321: mol_type = other DNA
atgaataaattaaactataatgcactaaacgaattacacaacactcttaggtgcggcgtgccagctgacgaatattcacaaggcataaatgataaagaggtgttgaagattatatttgagagcagcgaaggcaaacgtgatggcgtatctatcgaagatttactgactgtcgcctacgcaaagctggcaagttataaccgagaattaccatgccgcgaaaacagtgtagcccttacgaaaatcgaggaagctatcatgtggctggctaatcgcaaagctgagcgtgaagctcgcggcgtgtatggcactgaggaaaaataa

SEQ ID NO: 120 - DNA, 321 bp, synthetic construct
  misc_feature 1..321: note = TAD1 homologous NA sequence
  source 1..321: mol_type = other DNA
atgaataagtcaaactataacgcactaaacgaattacacaacactcttaggtgcggcgtgccagccgacgaatattcgcagggtatcaatgacgaagaggttttgagaatcaaatttgcaagtagagaaggcaaacgcgatggcgtatctatcgaagatttactgactgtcgcctacgcaaagctggcaagttataaccgagaattaccatgccgcgaaaacagcgtggcactcacgaagattgaggaagctattatgtggctagctaatcgcaaagctgagcgtgaagctcgcggcgtgtatggcactgaggaaaaataa

SEQ ID NO: 121 - DNA, 321 bp, synthetic construct
  misc_feature 1..321: note = TAD1 homologous NA sequence
  source 1..321: mol_type = other DNA
atgaataagtcaaactataacgcactaaacgaattacacaacactcttaggtgcggcgtgccagctgacgaatattcgcagggtatcaatgacgaagaggttttgagaatcaaatttgcaagtagcgaaggcaaacgcgatggcgtatctatcgaagatttactgactgtcgcctacgcaaagctggcaagttataaccgagaattaccatgccgcgaaaacagcgtggcactcacgaagattgaggaagctatcatgtggctagctaaccgtaaggctgagcgtgaagctcgcggcgtgtatggcactgaggaaaaataa

SEQ ID NO: 122 - DNA, 471 bp, synthetic construct
  misc_feature 1..471: note = TAD1 homologous NA sequence
  source 1..471: mol_type = other DNA
atgaatagaaaattatgtattgaagatttaataatatatgctctaagaggaattgattatgccgaaactaagaagggaggtgaattaatgcgaaaattagatacaatacaaactaaagaaaacttaaacgacatttatgcaatagataatattggaccaggtggagcaaatcatcaatatatgattgttccaaatggaactcaggtaacagaagaaacactcaactatggatatttaaataaaatccaaatgcaatgcggcccaagaaatgagacaaatctagcaaatggattactccctaatgatttattagagatagctagagatgtgctaaagggttttcaatcaagtgactttgcaaatatatataatgaaaaagcattaggacatattgaaatagctttactatatcttaataaaagagtagaagacagaataaaaagacaggtgttaggcaaatatgaaaaataa

SEQ ID NO: 123 - DNA, 471 bp, synthetic construct
  misc_feature 1..471: note = TAD1 homologous NA sequence
  source 1..471: mol_type = other DNA
atgaatagaaaattatgtattgaagatttaataatatatgttctaagaggaattgattatatagaaaccaagaaaggaggtgaattaatgcgaaaattagatacaatacaaactaaagaaaacttaaacgacatttatgcaatagataatattggaccaggtggagcaaatcatcaatatatgattgttccaaatggaactcaggtaacagaagaaacactcaactatggatatctaaataaaatccaaatgcaatgcggcccaagaaatgagacaaatctagcaaatggattactccctaatgatttattagagatagctagagatatactaaagggttttcaatcaggtgactttgcaaatatatataatgaaaaagcattaggacacattgaaatagctttactatatcttaataaaagagtagaagacagaataaaaagacaggtgttaggcaaatatgaaaaataa

SEQ ID NO: 124 - DNA, 240 bp, synthetic construct
  misc_feature 1..240: note = TAD1 homologous NA sequence
  source 1..240: mol_type = other DNA
atgaatcgaaacagtaaccattatataaatattaaatttcaagcaggagctattgaccatgaaggcgttaatggctgtcaagtggaagatgttattagcgtgttagtggagaaactaaaatcacatcagaatggtgaatttgcatgtgctgaaaattcaattgctatttcaaatttagaaaccgctaactatgcattacgagtgagaaaagaaagacttgaaaataaggaaagaacataa

SEQ ID NO: 125 - DNA, 363 bp, synthetic construct
  misc_feature 1..363: note = TAD1 homologous NA sequence
  source 1..363: mol_type = other DNA
atgaatctgccaactaatgaagtaagcggtgaattgatccataaagataataatggtgtatgtgttgaacacatgatcgcacctgattatccagacggccattggtatcaaatttttcattcagaaaaattcacagttgatattacttttcaaaatggtccaattaaagaacatggtgtaaatggcttaacaagtgaagcactgttatctattcttattcaccgtacaaagattctaaacgatcgattcccatgtgatgaaaataagcgtgcaatcacctatatggaaaatgcattagctctatttgaacagcgaactaaagaccgtttatcgcgtggtgtagaaggtcagaataagatttaa

SEQ ID NO: 126 - DNA, 420 bp, synthetic construct
  misc_feature 1..420: note = TAD1 homologous NA sequence
  source 1..420: mol_type = other DNA
atgaattgtccaaaatgttctggtgtgagaatatccactgaaagaaggccaaatggtaaccacgtttgtggtagttgtggccatgcttggccgaatcaagcgggaaaagaaccgatgcgaccggagggtcaaagagcctatcctttcctaagtggcgagtacaagccctacatttatatcaatgatgaaagcgtaactttcgttggtcaaggtggtccgattaaagaagtaggcgtaaacggctgccaaattgacgatattatcgaatttgccaaagatgtaattacagtatttaatcaacgttttccttgccgcgaaaattcaatgattattaccaagcttgatgaggcattgctttggagtatgaaacgcaaacttgatcgggataagcgcggtgtcgaagggacgtctaataaatag

SEQ ID NO: 127 - DNA, 633 bp, synthetic construct
  misc_feature 1..633: note = TAD1 homologous NA sequence
  source 1..633: mol_type = other DNA
atgacagaacaaaaagaacaagagtgcgaagaattaaaaagagaaatagcctttgggaacaatgggaaattgtctgacaaaataagagccatagtttttaaaaacttaaatgatgaaaactcaaaatataaacaaacacttgatgagattgaaaaatattgcgaagaacaaaatttaaaatatgacaataccgcttgtgatattttgaacatcatcaacaataccgaggagaataacacaattaataacaatgaacaaaatcaaaaagaaaagaaatttatttacggagaaagcaaaggttgtaccgctatttatgcagtagatgaacctagtccaaataataattcataccacgaatttattataaattatgaacctgattcaaaaacgacagaatttttaggaaaaatcaaattgcaaaatggcaactttgcggaatttggacataacggaattttcacagaacatcttttggttattgctaaagattgccttgaaagattcaacacaagtaaatatgcttgccaagaaaattcgattgcaattaacaatatcaataatgctcttatgtggctgaacaaaagagctactgaacgtgtcaaacgtggagtttacggaactgaaactgtatag

SEQ ID NO: 128 - DNA, 456 bp, synthetic construct
  misc_feature 1..456: note = TAD1 homologous NA sequence
  source 1..456: mol_type = other DNA
atgacccaagaaaataatgaagaatttgcactcgttacagatgttggtagtgatggcaaccttatcgtggaacaatttttaggatttgctaatcgtgatgtaaacgatgaggagtttgagcaggttcttacaggccaacccgttgatggaattacggcatatcagccaggtacatactataaaatttccgctgatcctacttcgattgattataacgagccattcgatattcatatccattttcaggaaggcccaacagttattgatggtgtaaacggtgcaaccaacgaatctcttttaaaaattctgattcaccgcaccaaacttttagatgcacagttcccatcagagcagaataaacaagccattgtttcactagaaagtgctttagatgctttcaatgcacgtacagccgaacgtcaggaacgtggtgttgaaggccaacatatcgaataa

SEQ ID NO: 129 - DNA, 426 bp, synthetic construct
  misc_feature 1..426: note = TAD1 homologous NA sequence
  source 1..426: mol_type = other DNA
atgacccgaagcatcaacgatcacgtcgtcaatcccgccaacgatcagctcaccatcacggtgacggatgaacccggcgcgggcggcgccaaccacctgtacatgatcgagggcttcgacaccgagtcgaacgcctccgatccgttcaccgcgcgccacggccagccggccaagcacgccaccatcctgttccagaacggcccgattgccgaggtcgacgtcaacggcatcacgcaggaggtgctgctggcgatcgtcgccgaccgcctgcgcagcttccaggccggcccgttctcctgccgcgagaacgcgctggcgctgaccaagatcgaagaggccatgcactggctccagcagcgtacgctgcgccgcatgcgcgctggtgtggaaggcacgcacgcgaaggcgaccggcgacggcgcgtaa

SEQ ID NO: 130 - DNA, 414 bp, synthetic construct
  misc_feature 1..414: note = TAD1 homologous NA sequence
  source 1..414: mol_type = other DNA
atgacccgtagcatcaacgaccacgtcgtcaaccccgccaacgatctgctgaccatccgcgccatcgatgaacccggcgcgggcggcgcaaaccatgcgtatctggtggaaggcttcgacaacagcaccaacccgtcggatcccgacgaccaggacgcaaacaccacgctgattctcttccagaacggcccgatcaacgaagtgggcgtgaacggcgtcacgcaagaggtgctgctggccatcgtcgccgaccgcctgcgcagcttccaggccggcccgttctcctgccgcgaaaacgcgctggcgctgaccaagatcgaagaggccatgcactggctgcaacagcgcaccctgcgccgcatgcgcgctggtgtggaaggcactcacgcgaaggcgaccggcgacggcgcgtaa

SEQ ID NO: 131 - DNA, 414 bp, synthetic construct
  misc_feature 1..414: note = TAD1 homologous NA sequence
  source 1..414: mol_type = other DNA
atgacccgtagcatcaacgatcacgtcgtcaaccccgccaatgacctgctgaccatccgcgccattgatgaacccggcgcgggcggtgccaaccacgcctacctcgtggaaggcttcgacaacagcacgaatccttcggacccggacgaccaggatgccgacactaccctgatcctgttccagaacggtcccatcaacgaagtgggcgtgaacggcatcacccaggaagtgctgctggccatcgttgccgaccgcctgcgcagcttccaggccggcccgttctcgtgccgtgaaaacgcgctggcgctgaccaagattgaagaggccatgcactggttgcagcagcgcacgatccgccgcatgcgcgccggcgtggaaggcacgcacgcgaagacgaccggcgacggcgcataa

SEQ ID NO: 132 - DNA, 372 bp, synthetic construct
  misc_feature 1..372: note = TAD1 homologous NA sequence
  source 1..372: mol_type = other DNA
atgacgaattatatgaaattagaacatgaattgctagatggtgagtatacagaagtatggtgtgatgaaccaaaaccagattatgtccatcatgcaccacataagttccaagtagttgctacagaagaccgcgatacattagctcttattcgattccaagaaggggcaattaaagaacacggtgtaaacggtgtcacaaacgaagatttaatccttatggttatgaaacgtttagaatgcttccaagaaacgaagtatgcttgtcgtgataatgaagaggctctgaatggtttacacaaagcattgtaccatttaacgaaccgtacacgcgaacgtaaagctcggggagtagaaggaacgcaccaagtttaa

SEQ ID NO: 133 - DNA, 372 bp, synthetic construct
  misc_feature 1..372: note = TAD1 homologous NA sequence
  source 1..372: mol_type = other DNA
atgacgaattatatgaaattagagcatgaattactagatggtgaatatacagaggtatggtgtgatgagccaaagcaaaactatgtccatcatgcgccgcataagttccaagtagttgctacagaagaccgcgacacattagcgcttatccgattccaagaaggggcaattaaagaacacggtgtaaacggtgtcacaaacgaagatttaattcttatgattatgaaacgtttagaatgcttccaagaaaccaagtatgcttgtcgtgataatgaagaggctttaaatgggttacacaaagcattgtatcatttgacgaaccgtacacgcgaacgtaaagctcgtggagtagaaggaacgcacgaagtttag

SEQ ID NO: 134 - DNA, 363 bp, synthetic construct
  misc_feature 1..363: note = TAD1 homologous NA sequence
  source 1..363: mol_type = other DNA
atgactaaaatcaatttcagaattcaacgtaacaacaatcttaacgatgtgtttgtcgaagatttggcaggcccgggaaacggtcggcataattacgaaatacgtcgtgcggacacaggagaaaaattacttgatgttcagtttcaaaatggcgcgaggaaagaggaaaattctgttgccgggattttagacagcgacctgttggagatcgtacgtcaccgtttacaatcttttcaaaacggtgaatacaagacaagagaaaacgcctgtgcgcttacacatatagaagaagcgctcatgtggatgtcgaaacgtgcggacgatagggccgaacgtggagttcttgggactatgaataagtga

SEQ ID NO: 135 - DNA, 363 bp, synthetic construct
  misc_feature 1..363: note = TAD1 homologous NA sequence
  source 1..363: mol_type = other DNA
atgactaaaattaatttcagaattcaacgcaacaacaatcttaacgaaatctttgtagaagatttggcgggacccggtaacggaagacataattatgagatacaccgcgcagatacaggagaaacattactcaatcttcaattccaaaacggcgcgagaaaagaggaaaattctattgccggagttttagacaacgaccttttggagattgtacgtcaccgcttgcagtgttttcagcagggcgaatataaaacccgcgagaatgcctgcgcacttacgcacattgaggaagcccttatgtggatgtcaaagcgtgcagatgacagagcggagcgcggcgtgctggggacgatgaataagtaa

SEQ ID NO: 136 - DNA, 372 bp, synthetic construct
  misc_feature 1..372: note = TAD1 homologous NA sequence
  source 1..372: mol_type = other DNA
atgactaattatatgaaattagaacacgaattactagaaggtgagtatacagaggtatggtgtaatgaaccgaaagaagactatcttcatttcgctcctcatagattccaagtggttgctacagaagaccgcgatacattagctcttattagattccaagaaggggcaattaaagaacatggtgtaaacggtgtcacaaacgaagatttaatccttatgattatgaagcgtttagagagcttccaagaatcgaagtttgcttgtcatgataatgaagaggctttaaacgccttacataaggcattgtatcatttaacaaaccgtacacgcgaacgtaaagctcgtggagtagaaggaacacataaggtatga

SEQ ID NO: 137 - DNA, 372 bp, synthetic construct
  misc_feature 1..372: note = TAD1 homologous NA sequence
  source 1..372: mol_type = other DNA
atgactaattatatgaaattagaacacgaattactagatggtgagtatacagaggtatggtgtgatgaaccaaaaccagattatgtccatcacgcaccacataagttccaagtagttgctacagaagaccgcgacacattagctcttatccgattccaagaaggggcaattaaagaacacggtgtaaacggtgtcacaaacgaagatttaattcttatgattatgaaacgtttagaatgcttccaagaaacgaagtatgcttgtcacgataatgaagaagctttaaatggcttacataaagcgttgtaccatttaacagctcgtacacgcgaacgtaaagctcggggtgttgaaggaacgcaccaagtatga

SEQ ID NO: 138 - DNA, 372 bp, synthetic construct
  misc_feature 1..372: note = TAD1 homologous NA sequence
  source 1..372: mol_type = other DNA
atgactaattatatgaaattagaacacgaattactagatggtgagtatacagaggtatggtgtgatgaaccaaaaccagattatgtccatcacgcaccacataagttccaagtagttgctacagaagaccgtgacacattagctcttatccgattccaagaaggggcaattaaagaacacggtgtaaacggtgtcacaaacgaagatttaattcttatgattatgaaacgtttagaatgcttccaagaaacgaagtatgcttgtcacgataatgaagaagctttaaatggcttacataaagcgttgtaccatttaacagctcgtacacgcgaacgtaaagctagaggcgttgaaggaacgcataaggtatga

SEQ ID NO: 139 - DNA, 372 bp, synthetic construct
  misc_feature 1..372: note = TAD1 homologous NA sequence
  source 1..372: mol_type = other DNA
atgactaattatatgaaattagaacacgaattactagatggtgagtatacagaggtatggtgtgatgaaccgaaaccagattatttccaccacgcaccacataagttccaagtagttgctacagaagaccgcgacacattagctcttatccgattccaagaaggggcaattaaagaacacggtgtaaacggtgtcacaaacgaagatttaattcttatgattatgaaacgtttagaatgcttccaagaaacgaagtatgcttgtcacgataatgaagaagctttaaatggcttacataaagcgttgtaccatttaacagctcgtacacgagaacgtaaagctcgtggtgttgaaggaacgcaccaagtatga

SEQ ID NO: 140 - DNA, 396 bp, synthetic construct
  misc_feature 1..396: note = TAD1 homologous NA sequence
  source 1..396: mol_type = other DNA
atgactcaaaaagatttaggtaatagtgtttggggtgttgatatccatacagaccataatggcgtatcggtaacccaccacttatttgtcgatcctgaaaaagaaggtgatgagccaactaagcttcctgctggtcacttttatgacgtgattgccggtgaaaccattacccctattcatttccagaatggaccagtgaaagagcatggtgtgaacggtgcaaccagtgaagcattacttgctatcttgatccaccgcacaaaagttttgaatgataactttccatgtgatgaaaataagcgtgctatttcatatatggaaaatgcattggcattgtttgagcaacgtacgaaagagcgtcaggcccgtggtgttgaaggccagaatcttgcttaa

SEQ ID NO: 141 - DNA, 456 bp, synthetic construct
  misc_feature 1..456: note = TAD1 homologous NA sequence
  source 1..456: mol_type = other DNA
atgactcaagacaataatgaagaaattgcactaacaaccgatgtgggtagtgatggtgatctccttgtggagcaattcttagggttcacagataaagatattggcgacgaagaatttgaaaaattaatggctggtcaaacggtagaaggcgtaacagcttacaaaccagcaacctattacaaaatttcagccgatccgagctctactgactataacgaaccttttgatattcatctccattttcaagatggcccaacatttattgatggtgtgaatggcgcgaccaatgaatcattattaaagatcctgattcatcgtactcaatacctagacagtaaattcccttctgatcaaaacaaacaagctattgctgctatgcaatcggcattgggcgcatttgatgcacgtacagcagaacgtcaagcgcgtggtgttgaagggcaaccagtcgaataa

SEQ ID NO: 142 - DNA, 375 bp, synthetic construct
  misc_feature 1..375: note = TAD1 homologous NA sequence
  source 1..375: mol_type = other DNA
atgagaaaaataaacactattcaaaagagagaaaaattaaatgacatatatgctgtagatgataaatcgcatgatggtgcgaatcatcaatatttagtcgttaaagagggtagaaaaacatatgatttaaatgcaatattatgtgaaataccttttcaaaaaggttcacgtcaagattccaattctaaaaatggagttacaagctcagatttacttgaaatagtgagggatattttaataggatatcaaaaaggtccgtattcatgtagagaaaatgcttgtgctttaacacatatagaagaagctcttatgtggttaaataaaagagtaaatgatagaatagacaaaaatattttagggaaatatgaaaaataa

SEQ ID NO: 143 - DNA, 375 bp, synthetic construct
  misc_feature 1..375: note = TAD1 homologous NA sequence
  source 1..375: mol_type = other DNA
atgagaaaaataaatactatccaaaagagagaaaaattaaatgacgtctatgctgtagatgataaatcgcatgatggtgcgaatcatcaatatttaatcgttaaagagggtagaaaaacatatgatttaaatgcaatattatgtgaaataccttttcaaaaaggttcacgtcaagattccaattctaaaaatggagttacaagctcagatttacttgaaatagtgagggatattttaataggatatcaaaaaggtccatattcatgtagagaaaatgcttgcgctttaacacatatagaagaagctcttatgtggttaaataaaagagtaaatgatagaatagacaaaaatattttagggaaatatgaaaaataa

SEQ ID NO: 144 - DNA, 366 bp, synthetic construct
  misc_feature 1..366: note = TAD1 homologous NA sequence
  source 1..366: mol_type = other DNA
atgagaaaacttgatacaattcagaagagaaacaatcttaatactgtgtatgcagtagatgaacccggtattggtaatgcaaatcacgcctatcaggttgtagtgaccaataatgaaggacacgaaattccttacgccattacattccagaatggccctcgtaaggaaaaggattctattcatggactgcttgatacagaccttttggagattgtgcgtgaccgtttaaaagggttccagtctggagattatccttgtcgtgagaacgctttggctcttacagccctcgaagaagcgctcttgtggatgcagaaaagagtagacgatagagcgtcccgtggtgttcttggaacaaataacaagtaa

SEQ ID NO: 145 - DNA, 369 bp, synthetic construct
  misc_feature 1..369: note = TAD1 homologous NA sequence
  source 1..369: mol_type = other DNA
atgagaaaagtaaatattggaacaaacaactacacagaagtatatgctacagacgaaccaaaatttaacgcaaatcataaatacgaagtacgaaacgtaccttcaggaggtgcagttatttcagaagatgaaatttatgctaaagtgtcttttcaaaaaggacctattaaagaaaatggtgtaaatggctgtcataatgaagatttaattgctatagtaattgataggcttgaatgtttaaatcaaggagatttcagatgcaaagaaaactctatcgcaattacaaagcttaaggaagctctgatgtggcttaacaaaagaacacttgatagaagattacgtagggtagaagggacaagtcaaaaataa

SEQ ID NO: 146 - DNA, 348 bp, synthetic construct
  misc_feature 1..348: note = TAD1 homologous NA sequence
  source 1..348: mol_type = other DNA
atgagaaaagtaaatattggaacaaataactatacagaggtatatgctacagacgaaccagcgtttaatgcaaatcatgaatatattgtttcagcagttaattcaacaaatgattatgctaaagtttcttttcaaaaaggtgccattaaagaaaacgggtcaaatggctgccataataaagatttaattgcaatagtaattgataggcttgaatgtttaaatcaaggagatttcagatgcagagaaaactctattgcaattacaaagcttgaggaagctttgatgtggcttaacaaaagaacagttgatagaaggtcacgtggcgtagaagggacaagacaaaaataa

SEQ ID NO: 147 - DNA, 387 bp, synthetic construct
  misc_feature 1..387: note = TAD1 homologous NA sequence
  source 1..387: mol_type = other DNA
atgagaaaattaaatacaatacaaaaaagagaaaaattaaacgatgtttacgcagtagatgaaataggtccaggaggggcaaatcatagatatataatttgcgaagaaggtgaaacttgttggtgtgatggaagtaatattataggtgttgtagctgatatatttttacaacgtggaccaagaaaagataagaactcacaacatggagtaatagatacagatttactagagatagtgagagatagaatgaaagcttttcaagctggaccattcgccagtgaatacaatgaaaaagcattagaacatatagaattagctttaatgtatcttaatcgtagagttgaagacagaatagaaagaaatgtattaggaacatacgaaaaataa

SEQ ID NO: 148 - DNA, 384 bp, synthetic construct
  misc_feature 1..384: note = TAD1 homologous NA sequence
  source 1..384: mol_type = other DNA
atgagaaaattaagcacaatacaaaaaaaggaaaaattaaatagtatatatgcagttgatgaaaaaggaccaggaggagcatatcataaatatgcaatagtaccatgttgtgaagacgaagtaatgttagtaataacatatgaacctatgtgtgaaatacaactacaatgtggacctagaaaagaagaaaactcaatacatggtgtaatagatacagatttattagaaatagtaagggacagattaaaagcatttcaagctggaccattttcaagtgattacaatgaaaaagcgttggaacatatagaagaagctttaatgtggatgaatagaagagttgaagatagaattgaaagaaatgtattaggtaaaaacattaagtaa

SEQ ID NO: 149 - DNA, 387 bp, synthetic construct
  misc_feature 1..387: note = TAD1 homologous NA sequence
  source 1..387: mol_type = other DNA
atgagaaaattaagtactatccaaaaaagagaaaagttaaacgatgtttatgcagcagatgaaataggtccaggaggggcaaatcatagatatataatttgcaaagaaggtgaaacttgttggtgtgatggaagtaattttataggtgttgtagctgagatacttttacaacgtggaccaagaaaagataagaactcacaacatggagtaatagatacagatttactagaaatagtgagagatagaatgaaagcttttcaagctggaccattcgccagtgaatacaatgaaaaagctttagaacatatagaattagctttaatgtatcttaatcgtagagttgaagatagaatcgaacgtaatgttttaggtacatataataaatag

SEQ ID NO: 150 - DNA, 387 bp, synthetic construct
  misc_feature 1..387: note = TAD1 homologous NA sequence
  source 1..387: mol_type = other DNA
atgagaaaattaagtactattcaaaaaagagaaaaattaaacgatgtttacgcagcagatgaaataggtccaggaggggcaaatcatagatatataatttgcaaagaaggtgaaacttgttggtgtgatggaagtaattttataggtgttgtagctgagatacttttacaacgtggaccaagaaaagataagaactcacaacatggagtaatagatacagatttactagaaatagtgagagatagaatgaaagcttttcaagctggaccattcgccagtgaatacaatgaaaaagcattagaacatatagaatgggctttaatgtatcttaatcgtagagttgaagatagaatagaaagaaatgttttaggaaaaaacgagaaatag

SEQ ID NO: 151 - DNA, 387 bp, synthetic construct
  misc_feature 1..387: note = TAD1 homologous NA sequence
  source 1..387: mol_type = other DNA
atgagaaaattaagtactattcaaaaaagagaaaaattaaacgatgtttacgcagtagatgaaataggtccaggaggggcaaatcatagatatataatttgcgaagaaggtgaaacttgttggtgtgatggaagtaatattataggtgttgtagctgatatatttttacaacgtggaccaagaaaagataagaactcacaacatggagtaatagatacagatttactagagatagtgagagatagaatgaaagcttttcaagctggaccattcgccagtgaatacaatgaaaaagcattagaacatatagaattagctttaatgtatcttaatcgtagagttgaagatagaatagaaagaaatgttttaggaaaaaacgagaaatag

SEQ ID NO: 152 - DNA, 387 bp, synthetic construct
  misc_feature 1..387: note = TAD1 homologous NA sequence
  source 1..387: mol_type = other DNA
atgagaaaattaagtactattcaaaaaagagaaaaattaaatgatgtatatgcagcggatgaaataggttcaggaggggcaaatcatagatatataatttgcaaagaaggtgaaacttgttggtgtgatggaagtaattttataggtgttgtagctgagatacttttacaacatggagtaagaaaagataagaactcacaacatggagtaatagatagtgatttattagaaatagtaagagataggatgaaagcttttcaagctggacaatttgccagtgaatataatgaaaaagcattagaacatatagaattagctttaatgtatcttaatcgtagagttgaagatagaatagaaagaaatgttttaggaaaaaacgagaaataa

SEQ ID NO: 153 - DNA, 387 bp, synthetic construct
  misc_feature 1..387: note = TAD1 homologous NA sequence
  source 1..387: mol_type = other DNA
atgagaaaattaagtactattcaaaaaagagaaaaattaaatgatgtatatgcggcagatgaaataggtcaaggaggggcaaatcatagatatataatttgcaaagaaggtgaaacttgttggtgtgatggaagtaattttataggtgttgtagctgagatacttttacaacatggagtaagaaaagataagaactcacaacatggagtaatagatagtgatttattagaaatagtaagagatagaatgaaagcttttcaagctggacaatttgccagtgaatataatgaaaaagcattagaacatatagaattagctttaatgtatcttaatcgtagagttgaagatagaatagaaagaaatgttttaggaaaaaacgagaaataa

SEQ ID NO: 154 - DNA, 387 bp, synthetic construct
  misc_feature 1..387: note = TAD1 homologous NA sequence
  source 1..387: mol_type = other DNA
atgagaaaattaagtactattcaaaaaagagaaaaattaaatgatgtatatgcggcagatgaaataggtcaaggaggggcaaatcatagatatataatttgcaaagaaggtgaaacttgttggtgtgatggaagtaattttataggtgttgtagctgagatacttttacaacatggagtaagaaaagataagaactcacaacatggagtaatagatagtgatttattagaaatagtaagagataggatgaaagcttttcaagctggacaatttgccagtgaatataatgaaaaagcattagaacatatagaattagctttaatgtatcttaatcgtagagttgaagatagaatagaaagaaatgttttaggaaaaaacgagaaataa

SEQ ID NO: 155 - DNA, 387 bp, synthetic construct
  misc_feature 1..387: note = TAD1 homologous NA sequence
  source 1..387: mol_type = other DNA
atgagaaaattaagtactattcaaaaaagagaaaaattaaatgatgtatatgcggcagatgaaataggtcaaggaggggcaaatcatagatatataatttgcaaagaaggtgaaacttgttggtgtgatggaagtaattttataggtgttgtagctgagatacttttacaacatggagtaagaaaagataagaactcacaacatggagtaatagatagtgatttattagagatagtaagagataggatgaaagcttttcaagctggacaatttgccagtgaatataatgaaaaagcattagaacatatagaattagctttaatgtatcttaatcgtagagttgaagatagaatagaaagaaatgttttaggaaaaaacgagaaataa

SEQ ID NO: 156 - DNA, 387 bp, synthetic construct
  misc_feature 1..387: note = TAD1 homologous NA sequence
  source 1..387: mol_type = other DNA
atgagaaaattaagtactattcaaaaaagagaaaaattaaatgatgtatatgtggcagatgaaataggtcaaggaggggcaaatcatagatatataatttgcaaagaaggtgaaacttgttggtgtgatggaagtaattttataggtgttgtagctgagatacttttacaacgtggaccaagaaaagataagaactcacaacatggagtaatagatacagatttactagaaatagtgagagatagaatgaaagcttttcaagctggacaatttgccagtgaatataatgaaaaagcattagaacatatagaattagctttaatgtatcttaatcgtagagttgaagatagaatagaaagaaatgttttaggaaaaaacgagaaataa

SEQ ID NO: 157 - DNA, 369 bp, synthetic construct
  misc_feature 1..369: note = TAD1 homologous NA sequence
  source 1..369: mol_type = other DNA
atgagaaaattagaaacaattcagaaaagagaaaaattaaatgatgtttttgcagtagatgaaataggaccgggaggagcaaatcatgaatatcatattactttaaataatggaaaagatactgcaagtgatgttgctataattcaaatgcaaaaaggtcctagaaaaaatgttgactctatacatggagtaattgatagtgatttgcttgaaatagtaagagataggctaaaagcatttcaagcaggaccatttgcaagtgagtacaatgaacaagccttaaagcatattgaacaagctttaacatggatgaataaaagagttgaagatagagtcaaaagaaatgtactaggaacatacaataaataa

SEQ ID NO: 158 - DNA, 375 bp, synthetic construct
  misc_feature 1..375: note = TAD1 homologous NA sequence
  source 1..375: mol_type = other DNA
atgagaaaattagaaactatacaaaaggttagtaaattgaatgatgtttatgcagttggtgaaaaaggtccaggaaatgctaatcatcaatatataataactaagaaagacgtagatgttacagaacttggtggagtagttggagaaatatcattccaaaaaggtccaagaaatttagaagattctcaacatggagttcttgatgtagatttactagaaatatgtagagacagacttaaaggattccaatcaggagattttgtttgtgaagaaaatcaaaaagcattagaacatatagaaatagctcttatgtatttaaataaaagaactgaagatagacattttagaaatgtattaggaaaatatgaaaaatag

SEQ ID NO: 159 - DNA, 402 bp, synthetic construct
  misc_feature 1..402: note = TAD1 homologous NA sequence
  source 1..402: mol_type = other DNA
atgagaaaattatcaacaattcagaaaaaagagaaattaaatgaagtattcgcggtagatgagcagggaccaggaggcgcaaatcatctgtatatggtttgcaaagcggaagaggcgaggttggatgatgacgcaagttcgatcagtgtcgaccctaatgccgtgatgtgcactatacagctgcagtgtgggccgcgcaaagaggataaatctacccacggtgtaattgacagcgatctgttggaaatcgtcagagaccgcctgaaatccttccaggcagggccgtatgcatctcgggagaatgcctgcgcccttacccatatagaggaggctcttatgtggatgaaccgtagagtagaggacaggattgaacggcaggtgctgggaacttacaataaataa

SEQ ID NO: 160 - DNA, 369 bp, synthetic construct
  misc_feature 1..369: note = TAD1 homologous NA sequence
  source 1..369: mol_type = other DNA
atgagaaagttacaaactattcaaaagaagaataatttaaacaaggtttttgcagtagatgaaaagggtaatggtggagctaatcatcaatattggattgcagcaagtaaatatgatggcgatgaaccttctatatttgaagttcaatttcaaaatggtgctagatttgaagatggctctaaggatggcgtattagattgtgacctattagaaatagtaagagatagacttttaggattccaagaaggggaatatgctaatggttacaatgaagcagcgttatatcatgttgagaaagctttaaagtggctaaatgagagagttgaggatagagatagaaggggtgtcttaggcactaacaataaataa

SEQ ID NO: 161 - DNA, 351 bp, synthetic construct
  misc_feature 1..351: note = TAD1 homologous NA sequence
  source 1..351: mol_type = other DNA
atgagagaacttagtacaatacagaagaggaacaacctcaatgaagtatatgcagcagatgaaacaggccccggcaatgcaaatcatgtttatttcatcaagtgtgatgatgagcctgttgtcatagcttttcagaaaggacctcgcatggatcctgaaagcacaagaggcgttcttgatgttgaccttcttgaaatagtaagagaccgcctgaaagggttccagtctggagatttcagttgcagagaaaacgcctgtgctcttacccacattgaagaagctctgatgtggatgaaccgcagagttgaggacagagcagaaagaaacgtgttaggtacttacgataagtaa

SEQ ID NO: 162 - DNA, 369 bp, synthetic construct
  misc_feature 1..369: note = TAD1 homologous NA sequence
  source 1..369: mol_type = other DNA
atgagagaattaagcacaattcagaaaagggaaaacttaaacaatgtttatgctgctgatgaaaagagtagcggtggggcaaatcacgaatatgtaatagatggagttgacccaaacggtgcctatgtttcttatcaaagaatacactttcaaaagggtcctagaaaagaagaggatgcgatacatggtgttttagattctgacttattagaaatcgtaagagataggttgaaaagttttcaagcaggaccattcgcaagcagagaaaatgcatgtgcattaacacatatcgaggaagcgcttatgtggatgaatcgcagagtcgaagatagaatcgaaagaaatgttttaggaacatatcaaaaataa

SEQ ID NO: 163 - DNA, 384 bp, synthetic construct
  misc_feature 1..384: note = TAD1 homologous NA sequence
  source 1..384: mol_type = other DNA
atgagagaattaagtacaatacaaaagagagaaaaattaaatgatgtttatgcagtagatgaaataggaccaggaggagcaaatcatcaatatgtaattgtacctcataacgtagatgttacagatgaaataatggaatatggatatttagttaaaataaaacttcaatgtgggccaagaaaagatgaaaattcacagcatggagttatagatacagatttactagaaatagtaagagatagaatgaaagcttttcaagctggaccatttgccagtgaatacaatgaaaaagcattagaacatatagaattagctttaatgtatcttaatcgtagagttgaagatagaattgaaagaaatgtattaggaacaaataataaataa

SEQ ID NO: 164 - DNA, 366 bp, synthetic construct
  misc_feature 1..366: note = TAD1 homologous NA sequence
  source 1..366: mol_type = other DNA
atgagagaattatcaacaattcagaaacgcgaaaatttgaacagagtatttgcagtagacgaacagggaccaggaggggctaaccacgaatatctgattgtatcagacaccgggctgatgcagccaaaggagcagcgtatcggatttcagaaagggccaagaaaagaggacgattccattcaaggagtgattgacagtgacctcctggaaattgtccgggacaggttgaaatcattccaggctgggccgttttcctcacgcgaaaatgcctgcgctcttacccacatagaggaagcgcttatgtggatgaaccgcagggttgaggataggattgagagggaagtcctgggaaccatgcagaaataa

SEQ ID NO: 165 - DNA, 357 bp, synthetic construct
  misc_feature 1..357: note = TAD1 homologous NA sequence
  source 1..357: mol_type = other DNA
atgagagagattaaaggtcacatcatcaatccaactaatgacacattatcattggtagcgatggatgaaaaagggcagggtaactctaatcatcattatcaagtaacgcatggtaatagcacgctagttgatgttcgtttccagaatggtcctattaatgagcacggcgtaaacggattaacaaacgaagtgttgcttgagattgttgcagaccgattacgcggttttcaagacggtgaatatcgctgcaaagaaaatgcttgtgcattgactcacattgaagaagcgcagcactggttgcagcagagaactattgagcgtatgcgtcgcggtgtagaaggtacgcacaaaaaatag

SEQ ID NO: 166 - DNA, 366 bp, synthetic construct
  misc_feature 1..366: note = TAD1 homologous NA sequence
  source 1..366: mol_type = other DNA
atgagaggattatcaacaattcagaaacgcgaaaatttgaacagagtatttgcagtagacgaacagggaccaggaggggctaaccatgaatatctgattgtgtcagacaccgggctgatgcagccaaaggagcagcgtatcggatttcagaaagggccaagaaaagaggacgattccattcaaggagtgattgacagtgacctcctggaaattgtccgggacaggttgaaatcattccaggctgggccgttttcctcacgcgaaaatgcctgcgctcttacccacatagaggaagcgcttatgtggatgaaccgcagggttgaggataggattgagagggaagtcctgggaaccatgcagaaataa

SEQ ID NO: 167 - DNA, 618 bp, synthetic construct
  misc_feature 1..618: note = TAD1 homologous NA sequence
  source 1..618: mol_type = other DNA
atgagcaagaaactattaacagcatctatggttgcatacattggtactaagtcagttttagcaacgcccatgacgcgtggtgaatacaatgaataccaagggtggcaaatccctgaaaatgaagacccaagtgatcctggttatttaatcgaatacaaagatggtggcaaggctaatcatccagatcatgaaggttatattacttggtcgccaaaagatgtttttgagcattcatatcaactagatggttttcaaaattgtgtaatgggccgtgaaattcataaagatgataatggagtaacagttacccataacgaaactgttaaaacccgtgatggtgaacagtctcttgaaaccggtcatttctatgacatcgtaactggagattcacttactccaattcaatttcaacttggtccagttaaggaagttggagtaaatggcatcacgaatgaagcattacttgcgatagttttacatcgtttacgtgttctgaatgaaaagtttccttgccgcgaaaattcacttgctattaccaatattgagcaaggtcaaatgtggctagagcaacgtacccgaaatcgtcagaagcgtggtgttgaaggttttaacatcgca

SEQ ID NO: 168 - DNA, 621 bp, synthetic construct
  misc_feature 1..621: note = TAD1 homologous NA sequence
  source 1..621: mol_type = other DNA
atgagcaagaaactattaacagcatctatggttgcatacattggtactaagtcagttttagcaacgcccatgacgcgtggtgaatacaatgaataccaagggtggcaaatccctgaaaatgaagacccaagtgatcctggttatttaatcgaatacaaagatggtggcaaggctaatcatccagatcatgaaggttatattacttggtcgccaaaagatgtttttgagcattcatatcaactagatggttttcaaaattgtgtaatgggccgtgaaattcataaagatgataatggagtaacagttacccataacgaaactgttaaaacccgtgatggtgaacagtctcttgaaaccggtcatttctatgacatcgtaactggagattcacttactccaattcaatttcaacttggtccagttaaggaagttggagtaaatggcatcacgaatgaagcattacttgcgatagttttacatcgtttacgtgttctgaatgaaaagtttccttgccgcgaaaattcacttgctattaccaatattgagcaaggtcaaatgtggctagagcaacgtacccgaaatcgtcagaagcgtggtgttgaaggttttaacatcgcttaa

SEQ ID NO: 169 - DNA, 621 bp, synthetic construct
  misc_feature 1..621: note = TAD1 homologous NA sequence
  source 1..621: mol_type = other DNA
atgagcaagaaactattaacagcatctatggttgcatacattggtactaagtcagttttagcaacgcccatgacgcgtggtgaatacaatgaataccaagggtggcaaatccctgaaaatgaagacccaagtgatcctggttatttaatcgaatacaaagatggtggcaaggctaatcatccagatcatgaaggttatattacttggtcgccaaaagatgtttttgagcattcatatcaactagatggttttcaaaattgtgtaatgggccgtgaaattcataaagatgataatggagtaacagttacccataacgaaactgttaaaacctgtgatggtgaacagtctcttgaaaccggtcatttctatgacatcgtaactggagattcacttactccaattcaatttcaacttggtccagttaaggaagttggagtaaatggcatcacgaatgaagcattacttgcgatagttttacatcgtttacgtgttctgaatgaaaagtttccttgccgcgaaaattcacttgctattaccaatattgagcaaggtcaaatgtggctagagcaacgtacccgaaatcgtcagaagcgtggtgttgaaggttttaacatcgcttaa

SEQ ID NO: 170 - DNA, 621 bp, synthetic construct
  misc_feature 1..621: note = TAD1 homologous NA sequence
  source 1..621: mol_type = other DNA
atgagcaagaaactattaacagcatctatggttgcatacattggtactaagtcagttttagcaacgcccatgacgcgtggtgaatacaatgaataccaagggtggcaaatccctgaaaatgaagacccaagtgatcctggttatttaatcgaatacaaagatggtggcaaggctaatcatccagatcatgaaggttatatttcttggtcgccaaaagatgtttttgagcattcatatcaactagatggttttcaaaattgtgtaatgggccgtgaaattcataaagatgataatggagtaacagttacccataacgaaactgttaaaacccgtgatggtgaacagtctcttgaaaccggtcatttctatgacatcgtaactggagattcacttactccaattcaatttcaacttggtccagttaaggaagttggagtaaatggcatcacgaatgaagcattacttgcgatagttttacatcgtttacgtgttctgaatgaaaaatttccttgccgtgaaaattcgcttgctattactaatattgagcaaggtcaaatgtggcttgagcaacgaactcgtaatcgacaaaaacgtggtgtagaaggctacaacattgcataa

SEQ ID NO: 171 - DNA, 621 bp, synthetic construct
  misc_feature 1..621: note = TAD1 homologous NA sequence
  source 1..621: mol_type = other DNA
atgagcaagaaactattaacagcatctatggttgcatacattggtactaagtcagttttagcaacgcccatgacgcgtggtgaatacaatgaataccaagggtggcaaatccctgaaaatgaagacccaagtgatcctggttatttaatcgaatacaaagatggtggcaaggctaatcatccagatcatgaaggttatatttcttggtcgccaaaagatgtttttgagcattcatatcaactagatggttttcaaaattgtgtaatgggccgtgaaattcataaagatgataatggagtaatagttacccataacgaaactgttaaaacccgtgatggtgaacagtctcttgaaaccggtcatttctatgacatcgtaactggagattcacttactccaattcaatttcaacttggtccagttaaggaagttggagtaaatggcatcacgaatgaagcattacttgcgatagttttacatcgtttacgtgttctgaatgaaaaatttccttgccgtgaaaattcgcttgctattactaatattgagcaaggtcaaatgtggcttgagcaacgaactcgtaatcgacaaaaacgtggtgtagaaggctacaacattgcataa

SEQ ID NO: 172 - DNA, 621 bp, synthetic construct
  misc_feature 1..621: note = TAD1 homologous NA sequence
  source 1..621: mol_type = other DNA
atgagcaagaaactattaacagcatctatggttgcatacattggtactaagtcagttttagcaacgcccatgacgcgtggtgaatacaatgaataccaagggtggcaaattcctgaaaatgaagatccagcagatccaggctatttgatcgagtacaaagatggtggcaaggctaatcatccagatcatgaaggttatatctcttggtcaccaaaggatgtttttgaacattcatatcaaccagatggtattcaaaattgtgtaatgggccgtgaaatccataaagatgataacgaagtaacggttttccataatgaaactgttaaaacccgagacggtgagcagtctcttgaaccaggacatttctatgatgtcgtagctggagatttacttactccaattcaattccaacttggtccagttaaggaagttggagttaatggcatcacgaatgaagctttacttgcgattgttttacatcgtttacgtgttctgaatgaaaagtttccttgccgcgaaaattcacttgctattactaatattgagcaaggtcaaatgtggctagagcaacgtacccgaaatcgtcagaagcgtggtgttgaaggttttaacatcgcctaa

SEQ ID NO: 173 - DNA, 621 bp, synthetic construct
  misc_feature 1..621: note = TAD1 homologous NA sequence
  source 1..621: mol_type = other DNA
atgagcaagaagctattaacagcatctatggttgcatacattggtacgaagtcagttttagcaacgcccatgacgcgtggtgaatacaatgaataccaagggtggcaaatccctgaaaatgaagaccctagtgatcctggttatttgatcgaatacaaagatggcggcaaagctaatcatcctgatcatgaaggttatatttcttggtcaccaaaggatgtttttgaacattcatatcaaccagatggttttcaaaattgtgtaatgggccgtgaaatccataaagatgataacgaagtaacggttttccataacgaaacgattaaaacccgagatgatgagcagtctcttgaaccaggtcatttctatgatgtcgtagctggagactcactcactccaattcaattccaacttggtccagttaaggaagttggagttaatggcatcacgaatgaagctttacttgcgattgttttacatcgtttacgtgttctaaatgaaaagtttccttgccgtgaaaattcacttgctattactaatattgagcaaggtcaaatgtggctagagcaacgtacccgaaatcgtcagaagcgtggtgttgaaggttttaacatcgcataa

SEQ ID NO: 174 - DNA, 471 bp, synthetic construct
  misc_feature 1..471: note = TAD1 homologous NA sequence
  source 1..471: mol_type = other DNA
atgagcaatcagcaccgcatccttgtcggtcatcaggtcaacccggccaatgacaccctgaccgtcgccgtcctcgacaggccaggcagaggtggcgcctgccacgcataccaggtctctggcgccaacatggcccgccaccctttcatgcgccaggccgtgcgcgagtttgcgggctctgacctatcggacgcccaggtcgacgccgcctttgcgcaggcctccgacggcgacacttcctcgctgatcctgttccaggatggccccatcgccgaggccggcgtgaacggcgtcacccatgaggtgctgctggcgattctgatcgaccgcctggagggcttccaggctggcccctatgcctgcgaggccaactcaaaggcgctggagcacatcaagtacgcccagcagcgcctccttgagcgcacccgtcagcgtatggcgcgcggcatggaaggaacgcacaaggtctag

SEQ ID NO: 175 - DNA, 456 bp, synthetic construct
  misc_feature 1..456: note = TAD1 homologous NA sequence
  source 1..456: mol_type = other DNA
atgagcgagaacacgcaagcccccgccgacctgccgcaggagcaaatcgagctgctcgggcacaagatcaacgctgccaacgaatcgttgacggtcctggcggtagaccgccccgccgccggtggcgcccactgcgtctacacgatcggcggctacaacgtccgcaagaatccccactacatcggcggcccgccctggctggcggacggctcggtggccatcacggccctgttcttccagaacggcgacatcgaccgaggcaacaacgtcaacggcatcacccacgaagcgctgctggccatcctggtccaccgcctcgagtgcttccaggccggcccgttcgcctgccgcgagaacgccatcgccctgaccaagctccaggaagcccagcactggctgcaccaccgcacccgcgggcgcatggagcgcggggtcgaaggcactcaccaggtctaa

SEQ ID NO: 176 - DNA, 387 bp, synthetic construct
  misc_feature 1..387: note = TAD1 homologous NA sequence
  source 1..387: mol_type = other DNA
atgagcgtggaaaaattaaacaccatacagaagcgaaacaacctcaacgaggtgtaccgcaatgataaacccggcgcgggcggagcctgccacgtctacgtgatctgccaccgcgtattccctgtcggtgagaaagaaagggtcgtccctattgcggaaatcgtcttccaacacggaccccgaaatgaagaaggcagcgcgacgggcattctcgacgcagaccttctcgaaatcgtccgcgaccgtttgaaggctttccagactggcgaatacgccaccagagagaacgcctgcgcgattacgcacatagaggaagctctcatgtggatgaacaaacgagccgaggacagagccgagagaggcgtactcggcacgatgcagaagtaa

SEQ ID NO: 177 - DNA, 387 bp, synthetic construct
  misc_feature 1..387: note = TAD1 homologous NA sequence
  source 1..387: mol_type = other DNA
atgagcgtggaaaaattaaacaccatacagaagcgaaacaacctcaacgaggtgtaccgcaatgatgaacccggcgcaggcggagcctgccacgtctacgtgatctgccaccgcgtattccctgtcggtgagaaagaaagggtcgtccctattgcagaaatcgtcttccaacacggaccccgaaatgaagaaggcagcgcgacgggcattctcgacgcagaccttctcgaaatcgtccgcgaccgcttgaaggctttccagaccggcgaatacgccaccagagagaacgcctgcgcgattacgcacatagaggaagccctcatgtggatgaacaaacgagccgaggacagagccgagagaggcgtactcggcacgatgcagaagtaa

SEQ ID NO: 178 - DNA, 387 bp, synthetic construct
  misc_feature 1..387: note = TAD1 homologous NA sequence
  source 1..387: mol_type = other DNA
atgagcgtggaaaaattaaacaccatacagaagcgaaacaacctcaacgaggtgtaccgcaatgatgaacccggcgcaggcggagcctgccacgtctacgtgatctgccaccgcgtattccctgtcggtgagaaagaaagggtcgtccctattgcagaaatcgtcttccaacacggaccccgaaatgaagaaggcagcgcgacgggcattctcgacgcagaccttctcgaaatcgtccgcgaccgcttgaaggctttccagactggcgaatacgccaccagagagaacgcctgcgcgattacgcacatagaagaagctctcatgtggatgaacaaacgagccgaggatagagccgagagaggcgtactcggcacgatgcagaagtaa

SEQ ID NO: 179 - DNA, 621 bp, synthetic construct
  misc_feature 1..621: note = TAD1 homologous NA sequence
  source 1..621: mol_type = other DNA
atgagtaagaaactattaacggcatctatggttgcatacattggtattaagtcagttttagcaacgcccatgacgcgtggtgaatacaatgaataccgggggtggcaaattcctgaaaatgaagacccaagtgatcccggttatttaatcgaatataaagatgggggcaaggctaaccatccagatcatgaaggttatatttcttggtcgccaaaggatgtttttgaacactcataccaaccagattgtgttcaaaatatcgtttctggaagagaaatacataaagatgataacgatgtaactgtcactcataacgaaactgttaaaactcgtgatggtgagcagtctctagagccgggacatttttatgatgttattgctggtgatttacttacgccaattcaattccaactcggaccagttaaggaagttggagttaatggcgtcacaaatgaagcgttacttgcaattgtccttcaccgtttacgtgttctgaatgaaaaatttccttgccgtgaaaattctctcgctattactaatcttgagcaaggtcaaatgtggctagagcaacgtacccgaaatcgtcagaagcgtggtgttgaaggttttaacatcgcataa

SEQ ID NO: 180 - DNA, 369 bp, synthetic construct
  misc_feature 1..369: note = TAD1 homologous NA sequence
  source 1..369: mol_type = other DNA
atgagtagaaagttagtaaattcaagaatattcacagcagtttattctaatgatgaaaaaggagagggcggagctaaacactattacactattgtttcaaatgaaacacacaatgtaaacgaaactccaaaagtatttgcaaatatccaattccaaaacggtgcaattttagaaaacggtatcaatggttgtcaaaatgaagatttaatcgaagttgtacttgatagattgagagattttcaaaatggcaaattcccttgtagagaaaatgctattgcaattacaaaattagaagaagctcttatgtggcttgataaacgaacactagaccgaaaagaaagaggtgttgaaggtattagtattgcttaa

SEQ ID NO: 181 - DNA, 378 bp, synthetic construct
  misc_feature 1..378: note = TAD1 homologous NA sequence
  source 1..378: mol_type = other DNA
atgagtgagttatcaactattcaaaagagagaaaaattaaatcatatattatcaaaagatgaagttggaccaggaggtgcacatcacaattatttaataattagtaatgaagctaatataagtactgaacagcctttatttgctactgaaatacaatttcaacaaggtgcaagaaaagaggaagattctattcatggtgttatagacacagacctattagaaatagtaagagatagattaaagtcttttcaagctggaccatttagttctgagtataatgcaaaggcgcttgagcatgtagaagaagcgcttatgtggatgaatagacgtgtagaagacagaatagaaagaaatgtattaggaacaaataataaataa

SEQ ID NO: 182 - DNA, 363 bp, synthetic construct
  misc_feature 1..363: note = TAD1 homologous NA sequence
  source 1..363: mol_type = other DNA
atgatagaaattagtagaatttttggagaaacagatagactttatattaagactttagatgagccgatggaaattaatggtggagtcaatcatcattttgcaatttgcaataaagaaaatgatgaggtaattcaagagataaaattccaaaaaggcccgataaaagaaaatggagttaatggtattcaaaatgtagatttaataaatattgtaattgataacctagagcattttcaaaaagggcaatttgcttgtgaatataatcaattagctttagagcatcttagacatgcattatcctggcttaatcaaagaactaaggatagaaaagctagaggtgtagaaggagaaaacaagcaatga

SEQ ID NO: 183 - DNA, 333 bp, synthetic construct
  misc_feature 1..333: note = TAD1 homologous NA sequence
  source 1..333: mol_type = other DNA
atgatggaaactaccaaatataacgcgctagaagaattgcataatgaactgaatcgcggcacaccaggcgatgaagtttctcttaatatcggcggcaaagaggtgctgagaatcaaatttcaaactggcggaaccgctactacagaacgcaatggcgtatttatcgaggacttgcttattgtagcttacgcaaaactagcgggctacaaccgagaattgccttgtcgcgaaaacagtgtggctcttacaaaaatcgaggaagctattatgtggctggctaatcgcaaagctgaacgtgaagctcgcggtgtatacggcactgaggagaagtag

SEQ ID NO: 184 - DNA, 363 bp, synthetic construct
  misc_feature 1..363: note = TAD1 homologous NA sequence
  source 1..363: mol_type = other DNA
atgatgtattcgccattgatgaggttggacctggggggcgcacaccacttataccaggtatgcaagctcaacacaggacgcatctctgatgaggacaacactttccgtacaagaccggaaaatatgcttgcaacaatccagatgcagtgtggcgcaagaaaagatcctgacgcaatcagcggtgttattgattctgacttactggaaattgtcagagacagactttccgctttccagcagggtccttatccatcttacgaaacagctcaggcgttataccatgttgagggagcgcttatgtggctcaatcgtagagttgaagatcgcgcaacgcgcggagtattaggaactgaaacaaaatag

SEQ ID NO: 185 - DNA, 375 bp, synthetic construct
  misc_feature 1..375: note = TAD1 homologous NA sequence
  source 1..375: mol_type = other DNA
atgattatggaaattaaaaacggtttatgcacacaaaaatatacataagtttatacagaggataaagaaaagtggaagtttaatgcaccgcatcattttattgttggcaaagcagattgtgaagaaaaatatatagaaccgattgaatatgttaactttcaagaaggtccaataaaagagtttggaataaacggagtaaataacgaagatttaattctaatggttataacaagactacaagcatttcaagatagtccttacaaatgcagagagaatgatatggctattacaaaactagaagagtgtttaatgtggttaagaaaaagaacattagacagaggggttaaaggaattgaaggcacaagcgaaatctaa

SEQ ID NO: 186 - DNA, 255 bp, synthetic construct
  misc_feature 1..255: note = TAD1 homologous NA sequence
  source 1..255: mol_type = other DNA
atgattcaaagcattaaattaaaattaaaacaacaaaaaatcaaaacaataaaaagaggtaaaataaaatgcgtaagcttaatacgattcagacttgagattgttcgtgaccgtcttcagggatttcagtctggcgagtttgcttgtcgtgaaaatgcgattgcacttactcatctcgaagagtgtttgctctggatgaataagagagttgaagaccgtgcagaacgtggagtacttggtacttctaataaataa

SEQ ID NO: 187 - DNA, 396 bp, synthetic construct
  misc_feature 1..396: note = TAD1 homologous NA sequence
  source 1..396: mol_type = other DNA
atgattcagtatactgaaattaaagataataattctaaaatggaattagaatcagatttattaataaaaaactatactaaaattacttgtgagaatagtaaagattggaaatttaatgcaccacatcattttgaagttagttctgtagaaaaggaagaagtattaggtaaagtaaattttcaggaaggtcctattaaagaaaatggtgttaatggcgtatctaatgaagatctgatcaatatgataattgctagattagaagcattccagagaacagattataattgtccagaaaatgctatggctattactaaattagaagaatcattgatgtggttaagaaaaagaaccaattctagatcaaaaagaggagtagaaggaactagcactatctaa

SEQ ID NO: 188 - DNA, 360 bp, synthetic construct
  misc_feature 1..360: note = TAD1 homologous NA sequence
  source 1..360: mol_type = other DNA
atgcaaaagatttttgaacaagcctatgcaggcaccgtcaaccgagttttcgttgttgatgagccagggccaggcaacggatgccatcagtatcgaacagagatagaagcagatggcgctgaattttgcactgagaccaacttccaaaaaggccctgtcaaagaagttggattgaatgggattcagaatgaacatctgctagccatggttatccaccggctgcaagggttccagtctggcccgtactcgtgcagagaaaatgcgcaggcgctagccagtcttcagaaggccatgcagtggatggaagcgagaacgaaagatagggctcaacgtggtgttgaaggagtgaaccagaaatag

SEQ ID NO: 189 - DNA, 360 bp, synthetic construct
  misc_feature 1..360: note = TAD1 homologous NA sequence
  source 1..360: mol_type = other DNA
atgcaaaagatttttgaacaagcctatgcaggcaccgtcaaccgagtttttgtggttgatgagccagggcaaggtaacggatgccatcagtatcgaacagagatagaagcagacggcgctgaattttacactgagaccaacttccaaaaaggccctgtccaagaagttggcttgaatggaattcagaatgagcatttgcttgccatggttatccaccggctgcaagggttccagtctggcccgtacgcttgcaatgaaaacgcgcaggcgctagccagtcttcagaaggccatgcagtggatggaagcgagaacgaaagataggtctgccaggaaagttgaagggctgaaccaaaagtaa

SEQ ID NO: 190 - DNA, 327 bp, synthetic construct
  misc_feature 1..327: note = TAD1 homologous NA sequence
  source 1..327: mol_type = other DNA
atgcaaacattacatactaaaataatttcaggagaaatcaattttaattctccttcatcttataaagtaatacataaaactactggagaagtagcacaaacaataaatattcagaaaggaccagtaaaggaaaacgggcttaatggaatttttattgaagatttacttttaatttgcatagatcaattagaacattttcaagctagtcagtttaaatgtaaagaaaatgaagctacattaagacatttaaatgatgcactagcaacaactagagcaagacaatatgaaagatatttaagagatgttcaaggaaaaaatttaaaatag

SEQ ID NO: 191 - DNA, 354 bp, synthetic construct
  misc_feature 1..354: note = TAD1 homologous NA sequence
  source 1..354: mol_type = other DNA
atgcaacaacgcatcatcgcagagaacttcaccgacaaagagggtaacccgcagggtggctacgccgtcggggcgggcatcgacatccggtggcagaacggccccctcgggcggggcgagagtcgcatcgagccgaatggggcgctcgtggagggtgtgatccaggccgccattctccgtctacagtactacgagacgaccaagttcaagtgctggcagaacgccggagccatcgcctacctccaggacgccctcggcatgttgatcgcctacctccaggacgccctcggcatgttggaggtgcggaccgcggaccgcgaggagcgcggcgtcgagggaacccatgtcgtctga

SEQ ID NO: 192 - DNA, 459 bp, synthetic construct
  misc_feature 1..459: note = TAD1 homologous NA sequence
  source 1..459: mol_type = other DNA
atgcaacaagctcaagaaaatgttttagtaggaatcgcagagcctatcaatggtcaaggagaaaacttattaattgatcatttcttaggatatgcaaaccaagaattagaaccacaaaaaattgataaagttgtaaatggggaagtggtagagggcattacagcttatgcccaaggccattactataaaatttcagcaaatcccgaaactcaaaatgcaaaagactttgaaatcagtcttcattttcaggatggcccaattcatgaacacggtgtgaatggggtgaccagtgaagcattgttaaaagtacttattcaccgtactaaaaccttggatgaaaagttcccaagtgagttcaacaagcaagccattatttacatggaaagtgcgctagaagaatttaataagcgtacagctgagcgccgtgctcgtggtgttgaagacactcttgctaagtaa

SEQ ID NO: 193 - DNA, 459 bp, synthetic construct
  misc_feature 1..459: note = TAD1 homologous NA sequence
  source 1..459: mol_type = other DNA
atgcaacaagctcaagaaaatgttttagtaggaatcgcagagcctatcaatggtcaaggagaaaacttattaattgatcatttcttaggatatgcaaaccaagaattagaaccacaaaaaattgataaagttgtaaatggggaagtggtagagggcattacagcttatgcccaaggccattactataaaatttcagcaaatcccgaaactccaaatgcaaaagactttgaaatcagtcttcattttcaggatggcccaattcatgaacacggtgtgaatggggtgactagtgaagcattgttaaaagtacttattcaccgtactaaaaccttggatgaaaagttcccaagtgagttcaacaagcaagccatcgttcacatggaaagtgctttaaaagaattcaataagcgtactgaagaacgccgtgctcgtggtgttgccgatactcttgttaagtaa

SEQ ID NO: 194 - DNA, 459 bp, synthetic construct
  misc_feature 1..459: note = TAD1 homologous NA sequence
  source 1..459: mol_type = other DNA
atgcaacaagctcaagacaatgttttagtaggaatcgcagaaccaatcaatgatcaaggagaaaacctattaattgatcatttcttaggttacgcaaaccgtgaattaaaaccacaagaaattgataaagttgttaatggggaaatggttgaaggcattacagcttatgctcagggccattactataagatttcagcaaatccagaaactcagaacgcaaaagattttgaaatcagtcttcattttcaggatggcccaattcctgaacatggggtgaatggagttactagtgaagcattgttaaaagtgcttattcaccgtactaaaactttagatgaaaaattcccaagcgaattcaataaacaagccattatttatatggaaagtgcgctagaagaatttaataagcgtacagcagagcgccgtgctcgtggtgttgaaggtacacttctaaagtaa

SEQ ID NO: 195 - DNA, 459 bp, synthetic construct
  misc_feature 1..459: note = TAD1 homologous NA sequence
  source 1..459: mol_type = other DNA
atgcaacaagctcaagacaatgttttagtaggaatcgcagaacctatcaatgatcagggagaaaacttattaattgatcatttcttaggatatgcaagccatgaattagaaccacaagaaattgataaagttattaaaggggaagtggttgaaggcatcacggaatatgctcagggccattactataagatttcagcaaatcctgaaaaccaaaatgcaaaagaatttgaaatcagtattcattttcaggatggcccaattccagaacatggtgtgaatggggttaccagtgaagcattgttaaaagtacttattcaccgtactaaaaccttggatgaaaaatttccgagcgagttcaacaaacaagccattatttatatggaaagtgcgctagaagaatttaataagcgtacagctgaacgccgtgctcgtggtgttgaaggcacacttgttaagtaa

SEQ ID NO: 196 - DNA, 459 bp, synthetic construct
  misc_feature 1..459: note = TAD1 homologous NA sequence
  source 1..459: mol_type = other DNA
atgcaacaagctcaagacaatgttttagtaggaatcgcagaacctatcaatggtcagggagaaaacttattaattgatcatttcttaggatatgcaagccatgaattagaaccacaagaaattgataaagttattaaaggggaagtggttgaaggcatcacggaatatgctcagggccattactataagatttcagcaaatcctgaaaaccaaaatgcaaaagaatttgaaatcagtattcattttcaggatggcccaattcctgaacatggggtgaatggagttactagtgaagcattgttaaaagtgcttattcaccgtactaaaactttagatgaaaaattcccaagcgaattcaataaacaagccattatttatatggaaagtgcgctagaagaatttaataagcgtacagcagagcgccgtgctcgtggtgttgaaggtacacttctaaagtaa

SEQ ID NO: 197 - DNA, 459 bp, synthetic construct
  misc_feature 1..459: note = TAD1 homologous NA sequence
  source 1..459: mol_type = other DNA
atgcaacaagctcaagacaatgttttagtaggaatcgcagaacctatcaatggtcagggagaaaacttattaattgatcatttcttaggatatgcaagccatgaattagaaccacaagaaattgataaagttattaaaggggaagtggttgaaggcatcacggaatatgctcagggccattactataagatttcagcaaatcctgaaaaccaaaatgcaaaagattttgaaatcagtattcattttcaggatggcccaattccagaacatggtgtgaatggggttaccagtgaagcattgttaaaagtacttattcaccgtactaaaaccttggatgaaaaatttccgagtgagttcaacaaacaagccattatttatatggaaagtgcgctagaagaatttaataaacgtacagctgaacgccgtgctcgtggtgttgaaggcactcttgttaagtaa

SEQ ID NO: 198 - DNA, 459 bp, synthetic construct
  misc_feature 1..459: note = TAD1 homologous NA sequence
  source 1..459: mol_type = other DNA
atgcaacaagctcaagacaatgttttagtaggaatcgcagaacctatcaatggtcagggagaaaacttattaattgatcatttcttaggatatgcaagccatgaattagaaccacaagaaattgataaagttattaaaggggaagtggttgaaggcatcacggaatatgctcagggccattactataagatttcagcaaatcctgaaaaccaaaatgcaaaagattttgaaatcagtattcattttcaggatggcccaattccagaacatggtgtgaatggggttaccagtgaagcattgttaaaagtacttattcaccgtactaaaaccttggatgaaaaatttccgagtgagttcaacaaacaagccattatttatatggaaagtgcgctagaagaatttaataaacgtacagctgagcgccgtgctcgtggtgttgaaggcactcttgttaagtaa

SEQ ID NO: 199 - DNA, 459 bp, synthetic construct
  misc_feature 1..459: note = TAD1 homologous NA sequence
  source 1..459: mol_type = other DNA
atgcaacaagctcaagacaatgttttagtaggaatcgcagaacctatcaatggtcagggagaaaacttattaattgatcatttcttaggatatgcaagccatgaattagaaccacaagaaattgataaagttattaaaggggaagtggttgaaggcatcacggaatatgctcagggccattactataagatttcagcaaatcctgaaaaccaaaatgcaaaagattttgaaatcagtattcattttcaggatggcccaattccagaacatggtgtgaatggggttaccagtgaagcattgttaaaagtacttattcaccgtactaaaaccttggatgaaaaatttccgagtgagttcaacaaacaagccattatttatatggaaagtgcgctagaagaatttaataagcgtacagctgaacgccgtgctcgtggtgttgaaggcacacttgttaagtaa

SEQ ID NO: 200 - DNA, 459 bp, synthetic construct
  misc_feature 1..459: note = TAD1 homologous NA sequence
  source 1..459: mol_type = other DNA
atgcaacaagctcaagacaatgttttagtaggaatcgcagaacctatcaatggtcagggagaaaacttattaattgatcatttcttaggatatgcaagccatgaattagaaccacaagaaattgataaagttattaaaggggaagtggttgaaggcatcacggaatatgctcagggccattactataagatttcagcaaatcctgaaaaccaaaatgcaaaagattttgaaatcagtattcattttcaggatggcccaattccaggacatggggtgaatggggttactagtgaagcattgttaaaagtacttattcaccgtactaaaaccttggatgaaaaatttccgagtgagttcaacaaacaagccattatttatatggaaagtgcgctagaagaatttaataaacgtacagctgagcgccgtgctcgtggtgttgaaggcacacttgttaagtaa

SEQ ID NO: 201 - DNA, 459 bp, synthetic construct
  misc_feature 1..459: note = TAD1 homologous NA sequence
  source 1..459: mol_type = other DNA
atgcaacaagctcaagacaatgttttagtaggaatcgcagaacctatcaatggtcagggagaaaacttattaattgatcatttcttaggatatgcaagccatgaattagaaccacaagaaattgataaagttattaaaggggaagtggttgaaggcatcacggaatatgctcaggggcattactataagatttcagcaaatcctgaaaaccaaaatgcaaaagattttgaaatcagtattcattttcaggatggcccaattccagaacatggtgtgaatggggttaccagtgaagcattgttaaaagtacttattcaccgtactaaaaccttggatgaaaaatttccgagtgagttcaacaaacaagccattatttgtatggaaagtgcgctagaagaatttaataaacgtacagctgagcgccgtgctcgtggtgttgaaggcactcttgttaagtaa

SEQ ID NO: 202 - DNA, 459 bp, synthetic construct
  misc_feature 1..459: note = TAD1 homologous NA sequence
  source 1..459: mol_type = other DNA
atgcaacaagctcaagacaatgttttagtaggaatcgcagaacctatcaatggtcagggagaaaacttattaattgatcatttcttaggatatgcaagccatgaattagagccacaagaaattgataaagttattaaaggggaagtggttgaaggcatcacggaatatgctcagggccattactataagatttcagcaaatcccgaaaaccaaaatgcaaaagattttgaaatcagtattcattttcaggatggcccaattccagaacatggggtgaatggggttactagtgaagcattgttaaaagtacttattcaccgtactaaaaccttggatgaaaaatttccgagtgagttcaacaaacaagccattagttatatggaaagtgcgctagaagaatttaataaacgtacagctgagcgccgtgctcgtggtgttgaaggcactcttgttaagtaa

SEQ ID NO: 203 - DNA, 459 bp, synthetic construct
  misc_feature 1..459: note = TAD1 homologous NA sequence
  source 1..459: mol_type = other DNA
atgcaacaagctcaagacaatgttttagtaggaatcgcagaacctatcaatggtcagggagaaaacttattaattgatcatttcttaggatatgctagccatgaattagaaccacaagaaattgataaagttattaaaggggaagtggttgaaggcatcacggaatatgctcagggccattactataagatttcagcaaatcctgaaaaccaaaatgcaaaagattttgaaatcagtattcattttcaagatggcccaattccagaacatggggtgaatggggttactagtgaagcattgttaaaagtacttattcaccgtactaaaaccttggatgaaaaatttccgagtgagttcaacaaacaagccattatttatatggaaagtgcgctagaagaatttaataaacgtacagctgagcgccgtgctcgtggtgttgaaggcactcttgttaagtaa

SEQ ID NO: 204 - DNA, 459 bp, synthetic construct
  misc_feature 1..459: note = TAD1 homologous NA sequence
  source 1..459: mol_type = other DNA
atgcaacaagctcaagacaatgttttagtaggaatcgcagaacctatcaatggtcagggagaaaacttattaattgatcatttcttaggatatgctagccatgaattagaaccacaagaaattgataaagttattaaaggggaagtggttgaaggcattacggaatatgctcagggccattactataagatttcagcaaatcctgaaaaccaaaatgcaaaagattttgaaatcagtattcattttcaagatggcccaattccagaacatggggtgaatggggttactagagaagcattgttaaaagtacttattcaccgtactaaaaccttggatgaaaaatttccgagtgagttcaacaaacaagccattatttatatggaaagtgcgctagaagaatttaataaacgtacagctgagcgccgtgctcgtggtgttgaaggcactcttgttaagtaa

SEQ ID NO: 205 - DNA, 459 bp, synthetic construct
  misc_feature 1..459: note = TAD1 homologous NA sequence
  source 1..459: mol_type = other DNA
atgcaacaagctcaagacaatgttttagtaggaatcgcagaacctatcaatggtcagggagaaaacttattaattgatcatttcttaggatatgctagccatgaattagaaccacaagaaattgataaagttattaaaggggaagtggttgaaggcattacggaatatgctcagggccattactataagatttcagcaaatcctgaaaaccaaaatgcaaaagattttgaaatcagtattcattttcaagatggcccaattccagaacatggggtgaatggggttactagtgaagcattgttaaaagtacttattcaccgtactaaaaccttggatgaaaaatttccgagtgagttcaacaaacaagccattatttatatggaaagtgcgctagaagaatttaataaacgtacagctgagcgccgtgctcgtggtgttgaaggcactcttgttaagtaa

SEQ ID NO: 206 - DNA, 459 bp, synthetic construct
  misc_feature 1..459: note = TAD1 homologous NA sequence
  source 1..459: mol_type = other DNA
atgcaacaagctcaagacaatgttttagtaggaatcgcagaacctatcaatggtcagggagaaaacttattaattgatcatttcttaggatatgctagccatgaattagaaccacaagaaattgataaagttattaaaggggaagtggttgaaggcattacggaatatgctcagggccattactataagatttcagcaaatcctgaaaaccaaaatgcaaaagattttgaaatcagtattcattttcaagatggcccaattccagaacatggggtgaatggggttactagtgaagcattgttaaaagtacttattcaccgtactaaaaccttggatgaaaaatttccgagtgagttcaacaaacaagccattatttatatggaaagtgcgctagatgaatttaataaacgtacagctgagcgccgtgctcgtggtgttgaaggcactcttgttaagtaa

SEQ ID NO: 207 - DNA, 459 bp, synthetic construct
  misc_feature 1..459: note = TAD1 homologous NA sequence
  source 1..459: mol_type = other DNA
atgcaacaagctcaagacaatgttttagtaggaatcgcagaacctatcaatggtgagggagaaaacttattaattgatcatttcttaggatatgctagccatgaattagaaccacaagaaattgataaagttattaaaggggaagtggttgaaggcattacggaatatgctcagggccattactataagatttcagcaaatcctgaaaaccaaaatgcaaaagattttgaaatcagtattcattttcaagatggcccaattccagaacatggggtgaatggggttactagtgaagcattgttaaaagtacttattcaccgtactaaaaccttggatgaaaaatttccgagtgagttcaacaaacaagccattatttatatggaaagtgcgctagaagaatttaataaacgtacagctgagcgccgtgctcgtggtgttgaaggcactcttgttaagtaa

SEQ ID NO: 208 - DNA, 459 bp, synthetic construct
  misc_feature 1..459: note = TAD1 homologous NA sequence
  source 1..459: mol_type = other DNA
atgcaacaagctcaagataatgttttagtaggaatcgcagaacctatcaatgatcaaggagaaaacctattgattgatcatttcttagggtgtgcaaaccgagaattagagccacacgaaatagataaagttgttaatggggaaatggttgaaggcatcacagcctacaagcaagggcactactataagatttcatctaataatgaaaagcaaaatgccactgactttgaaattagcattcacttccaagatggtccaatttcagaacatggtattaatggggcgaccagtgaagcgttattacaaatcctaatccaccgtacaaagactttggatgaaaatttcccaagtgagttcaacaaacaagcgattgcttatatggaaagtgccctagaagaattcaataagcgaacatccgagcgccgtgctcgtggtgttgaaggcacacttgttaagtaa

SEQ ID NO: 209 - DNA, 312 bp, synthetic construct
  misc_feature 1..312: note = TAD1 homologous NA sequence
  source 1..312: mol_type = other DNA
atgcaagtcctagtacctgggcacagatatgttgctcacaattttgaagacaaaaacggacatggccaaaccatccagtttattcataaagagccaaaaggtgatacaacagagcttgaaacagtttcggatggcacaaccaatgaagaactacttgctgtacttatcgaccgcatggtttttctccaaaatgcgtttccgtgtcgggaaaacgctattgtgattaccaagttagaagaatctttgatgtggctcaataagcgcacctcagaccgattgaagcgcaatgttgaaggaaagcaaattgcatag

SEQ ID NO: 210 - DNA, 384 bp, synthetic construct
  misc_feature 1..384: note = TAD1 homologous NA sequence
  source 1..384: mol_type = other DNA
atgcgaaaattaaatacaattcaaaaaagagaaaatttaaacgatatttatgcaatagatgaaaatggagcaggtggagcaaatcatgaatacatgatagttgaacataatacaaatattacagaagaaataattaattattcatatctgaacaaaataagattccaaagtggtccgagacaagaaaagaattcacaacatggattgatagacacagacttactagaaatagtaagagatagaatgaaagcatttcaagctggaccatttgctagcaaatataacgaaaaggcattagaacatatagaacttgcattaatgtaccttaatcgtagagttgaagatagaatcgaaagagatgtgctaggtaaatatgaaaagtaa

SEQ ID NO: 211 - DNA, 339 bp, synthetic construct
  misc_feature 1..339: note = TAD1 homologous NA sequence
  source 1..339: mol_type = other DNA
atgcgaatcttcaccgaccacaacggcgtcgccgtcaacgcgatcgccaagaccagcgacggccaggccgtcgagggccacctctaccaggtgctggccggcaccagccagcaggacatccgcttccagctcggcccggtgcagcaggccggcgtcaacggcgcgacgaacgaggcgctcatcgccgtgctggtgcaccgcctgcagcacctgaaccggctgtgcccgtgccgcgagaacagcctcgcgatcacgaagctcgaggaggccgcccactggctcgaggcgcgcacgcgcgaccgccaggcccgccaggtcgagggcaccagcgccgcctga

SEQ ID NO: 212 - DNA, 384 bp, synthetic construct
  misc_feature 1..384: note = TAD1 homologous NA sequence
  source 1..384: mol_type = other DNA
atgcgagaattaaatacaattcaaaaaagagaaaatttaaacgatatttatgcaatagatgaaaagggagcaggtggagcaaatcatgaatacatgatagttgaacataatacaaatattacagaagaaataattaattattcatatctgaacaaaataagattccaaagtggtccgagacaagaaaagaattcacaacatggattgatagacacagacttactagaaatagtaagagatagaatgaaagcatttcaagctggaccatttgctagcaaatataacgaaaaggcattagaacatatagaacttgcattaatgtaccttaatcgtagagttgaagatagaatcgaaagagatgtgctaggtaaatatgaaaagtaa

SEQ ID NO: 213 - DNA, 369 bp, synthetic construct
  misc_feature 1..369: note = TAD1 homologous NA sequence
  source 1..369: mol_type = other DNA
atgcgatacatcaacggacacaaggtcaatccagcaaacgacactcttgaagttgcggcggtggacgagcccggcctcggcggcgctagccaccactacgtcgtggcgcacgagaccaacgagtccgtgcgaacggagatcaagttccagaacggtgccatcagcatcgagggaaacggcgtcaacggcctgacccacgaagtcctgctggcgatcgtggctgaccggctgcgcagcttccagacagggaagttctcctgcaaggcgaacgcctgtgcgctgacgcacatcgaggaggcgatgcactggctccagagccgcaccatggagcggatgcgccgcggcgtcgaaggaacgcacgcggtctga

SEQ ID NO: 214 - DNA, 393 bp, synthetic construct
  misc_feature 1..393: note = TAD1 homologous NA sequence
  source 1..393: mol_type = other DNA
atgcgcacgatcaacgaccacaaggtcaatccagccaacgacaagattgaaattcgtgtcactgacgaacctggtgccggcggtgccaatcacgtctatgaggtatggctgcctgatatggtcgttgacggacccggtgaagggcatactcacggccccactgcgactatccgcttccagaatggcccgatcaacgaaaacggcgtcaacggcctcacgcaggaagtgctccttgcaatcgttgccgatcggcttcgcgctttccagtccgggccttacgcctgccgggagaatgcgctggcgctgacgaagatcgaggaagcgcagcactggctccacagtcgcacgctggcgcggatgtcgcgcggcgtcgaaggcacccacaagttttaa

SEQ ID NO: 215 - DNA, 366 bp, synthetic construct
  misc_feature 1..366: note = TAD1 homologous NA sequence
  source 1..366: mol_type = other DNA
atgcgcacgatcaacgatcacaaggtcaacccggcaaacgaccggatcgaaattcgcgtggtggaccagcccggcgcgggcggtgcaaaccacgaatatgatgttgtcatcgacaatggcaccacgggccaaattgcccgcatcagtttccagaatggcccgatcgccgaagctggcgtcaacggcctgacgcaagaggtgctgctcgccatcgtggctgaccgcctccgctccttccaagccggtcaatacgcctgccgcgagaacgcgctcgcactgacgaagatcgaagaggccatgcactggcttcacagccgcacgcgcgcccgcgtctctcgcggcgtcgaaggcacgcacaaggtctga

SEQ ID NO: 216 - DNA, 390 bp, synthetic construct
  misc_feature 1..390: note = TAD1 homologous NA sequence
  source 1..390: mol_type = other DNA
atgcgcattattgatgatcacaaagtcaacccggcaaacgaccagctcgaaattcaagttatcgacgagccaggcgcaggcggagcccaccacgcatatctggtccgtggcttcaacagccttagcaatccttctacgggcggagtggaactgaagtccacgatgatcctttttcaaaacggccccatcccggaagctggtgtcaacggcctgacacatgaagtacttctggccatcgttgcggatcgcctgcgtagctttcaagctggcccatacgcatgcaaggccaatgcatgcgccctgacccacatcgaggaagcccagcattggcttcagcagcgcacgctggagcgcatgcgccgcggcgttgaaggtacccatcaaaagtaa

SEQ ID NO: 217 - DNA, 405 bp, synthetic construct
  misc_feature 1..405: note = TAD1 homologous NA sequence
  source 1..405: mol_type = other DNA
atgcgccagattactgaccacgtcttcaatccagcgaacgacaagttgacgatcactgccatcgacgctcccggcgccggcggtgcgcagcatctctacatggttaaagggttcgacacctcgaccaatccatcctgccccttcaccgaacggcacggatcccccgcgacccacgcgaccgtgctgtttcagaacggtcccatcaacgaggtgggtgtgaacggcgtgacgcaggaggctctcttggcgatcgtcgccgatcgattgcgctcgttccaggccggaccattcgcatgtcgtgagaacgccttggctctcacgaagatcgaagaagcgcagcactggctgcagcagcggacgctcgcccgaatgtggcggggcgtcgaaggcacccaccagctttaa

SEQ ID NO: 218 - DNA, 405 bp, synthetic construct
  misc_feature 1..405: note = TAD1 homologous NA sequence
  source 1..405: mol_type = other DNA
atgcgcgagttgaacggccacaaggtaaacggttgcaacgaccatctcactatcactgtgctcgacgagccgggcaagggcggcgcgccgcacctctaccaggtcgaaggattcaatagcggaactaatccgtccgatccgtggacggcgcgtcatggtcagcccgctcaacattcgacgatcctgttccaaaacggcccgatccccgaagtcggaactaacgggctgacgcacgaagtgttgctcacgatcctgatcgaccgactggagggtttccagaacggcccgttcgcgcatccgtacaacgcagacgcgctcagctcactgcggtccgcgcgtgcgtctttgcagcaacgcacgaaggatcgactcgcacgtggcgtcgaaggcacgcaccaggtgtag

SEQ ID NO: 219 - DNA, 366 bp, synthetic construct
  misc_feature 1..366: note = TAD1 homologous NA sequence
  source 1..366: mol_type = other DNA
atgcgtaaacttaatacaattcagaagagaaacaatcttaatactgtgtatgcagtagatgaaaagggcattggtaatgccaatcatgtttacaatattgttgtaactgatggtcagggtaatgagactccctactctattgctttccagaatggtcctcgcaaggaaatggattcaattcatggacttcttgatacagaccttcttgagattgttcgtgaccgtcttcagggatttcagtctggcgagtttgcttgtcgtgagaatgcgattgcacttactcatctcgaagagtgtttgctctggatgaacaagagagttgaagaccgtgcagaacgtggagtacttggtacttctaataagtaa

SEQ ID NO: 220 - DNA, 366 bp, synthetic construct
  misc_feature 1..366: note = TAD1 homologous NA sequence
  source 1..366: mol_type = other DNA
atgcgtaagcttaatacaattcagaagaagaacaaccttaatactgtgtacgcagtagatgaaaagggcattggtaatgccaaccatgtttacaatgttattgtaactgatggtcagggtaatgagactccatattctattgctttccaaaatggtcctcgcaaggaaatgaattcaattcatggacttcttgacacagaccttcttgagattgttcgtgaccgtcttcagggtttccagtctggtgaatttgcttgtcgtgaaaatgcgattgcacttactcatctcgaagagtgtttgctctggatgaataagagagttgaagaccgtgcagaacgtggagtacttggtacttctaataaataa

SEQ ID NO: 221 - DNA, 366 bp, synthetic construct
  misc_feature 1..366: note = TAD1 homologous NA sequence
  source 1..366: mol_type = other DNA
atgcgtaagcttaatacaattcagaagagaaacaaccttaacactgtgtatgcagttgatgaaaagggcattggtaatgccaaccatgtttacaatgttattgtaactgatggtcagggtaatgagactccatattctattgctttccagaatggtcctcgtaaggaaatggattcaattcatggacttcttgacacagaccttcttgagattgttcgtgaccgtcttcagggatttcagtctggcgagtttgcttgtcgtgaaaatgcgattgcacttactcatctcgaagagtgtttgctctggatgagcaaaagagttgaagaccgtgcagaacgtggagtacttggtacttctaataagtaa

SEQ ID NO: 222 - DNA, 366 bp, synthetic construct
  misc_feature 1..366: note = TAD1 homologous NA sequence
  source 1..366: mol_type = other DNA
atgcgtaagcttaatacaattcagaagagaaacaaccttaatactgtgtatgcagttgatgaaaagggcattggtaatgccaaccatgtttacaatgttattgtaactgatggtcaaggtaatgagactccatattctattgctttccagaatggtcctcgtaaggaaatggattcaattcatggacttcttgacacagaccttcttgagattgttcgtgaccgtcttcagggatttcagtctggcgagtttgcttgtcgtgaaaatgcgattgcacttactcatctcgaagagtgtttgctctggatgagtaagagagttgaagaccgtgcagaacgtggagtacttggtacttctaataagtaa

SEQ ID NO: 223 - DNA, 366 bp, synthetic construct
  misc_feature 1..366: note = TAD1 homologous NA sequence
  source 1..366: mol_type = other DNA
atgcgtaagcttaatacaattcagaagagaaacaaccttaatactgtgtatgcagttgatgaaaagggcattggtaatgccaaccatgtttacaatgttattgtaactgatggtcagggtaatgagactccatattctattgctttccagaatggtcctcgtaaggagactgattctattcatggtcttcttgatacagaccttcttgagattgttcgtgaccgtcttcagggttttcagtctggtgagtttgcttgtcgtgagaatgccctcgcacttactcatctggaggaatgtttattgtggatgcataagagagttgaagaccgtgcagaacgtggagtacttggtactaccaataagtaa

SEQ ID NO: 224 - DNA, 366 bp, synthetic construct
  misc_feature 1..366: note = TAD1 homologous NA sequence
  source 1..366: mol_type = other DNA
atgcgtaagcttaatacaattcagaagagaaataatcttaatactgtgtacgcagttgatgaaaagggcattggtaatgccaaccatgtttacaatgttattgtaactgatggtcagggtaatgagactccatattctattgctttccagaatggtcctcgcaaggaaatgaattcaattcatggacttcttgacacagaccttcttgagattgttcgtgaccgtcttcagggtttccagtctggtgaatttgcttgtcgtgaaaatgccattgcacttactcatctggaagagtgtttattgtggatgaattttcgtgttgagaatcgtgcagaacgtggagtgcttggtacttctaataagtaa

SEQ ID NO: 225 - DNA, 366 bp, synthetic construct
  misc_feature 1..366: note = TAD1 homologous NA sequence
  source 1..366: mol_type = other DNA
atgcgtaagcttaatacgattcagaaaagaaacaaccttaatactgtgtacgcagttgatgaaaagggcattggtaatgccaaccatgtttataatgttattgtaactgatggtcagggtaatgagactccatattctattacttttcagaatggtcctcgcaaggaaatgaattcaattcatggacttcttgacacagaccttcttgagattgttcgtgaccgtcttcagggatttcagtctggcgagtttgcttgccgtgagaatgcgattgcacttactcatctagaagagtgcttgctctggatgaacaagagagttgaagaccgtgcagaacgtggagtgcttggcactaataataagtaa

SEQ ID NO: 226 - DNA, 366 bp, synthetic construct
  misc_feature 1..366: note = TAD1 homologous NA sequence
  source 1..366: mol_type = other DNA
atgcgtaagcttaatacgattcagaagagaaacaaccttaatactgtgtacgcaattgatgaaaagggcattggtaatgccaaccatgtttacaatgttattgtaactgatggtcagggtaatgagactccatattctattgccttccagaatggtcctcgcaaggaaatggattcaatccatggacttcttgacacagaccttcttgagattgttcgtgaccgtcttcagggtttccagtctggtgaatttgcttgtcgtgaaaatgccattgcacttactcatctggaagagtgtttattgtggatgaattttcgtgttgagaatcgtgcagaacgtggagtgcttggtacttctaataagtaa

SEQ ID NO: 227 - DNA, 366 bp, synthetic construct
  misc_feature 1..366: note = TAD1 homologous NA sequence
  source 1..366: mol_type = other DNA
atgcgtaagcttaatacgattcagaagagaaacaaccttaatactgtgtacgcagtggatgaaaagggtgttggaaatgccaatcatgtttacaatgttgttgtaactgatggtcagggtaatgagactccctattctattgctttccagaatggtcctcgtaaggaaatggattcaattcatggacttcttgatacagaccttcttgagattgttcgtgaccgtcttcagggatttcagtctggcgagtttgcttgtcgtgaaaatgcgattgcacttactcatctcgaagagtgtttgctctggatgaatcttcgtgttgaaaatcgtgcagaacgtggagtgcttggcactaataataagtaa

SEQ ID NO: 228 - DNA, 366 bp, synthetic construct
  misc_feature 1..366: note = TAD1 homologous NA sequence
  source 1..366: mol_type = other DNA
atgcgtaagcttaatacgattcagaagagaaacaaccttaatactgtgtacgcagttgatgaaaagggcattggtaatgccaaccatgtttacaatgttattgtaactgatggtcagggtaatgagactccatactctattgctttccagaatggtcctcgcaaggaaatgaattcaattcatggacttcttgacacagaccttcttgagattgttcgtgaccgtattcagggtttccagtctggcgagtttgcttgccgtgagaatgcgattgcacttactcatctcgaagagtgtttgctctggatgaatcttcgtgttgaaaatcgtgcagaacgtggagtacttggtacttctaataagtaa

SEQ ID NO: 229 - DNA, 366 bp, synthetic construct
  misc_feature 1..366: note = TAD1 homologous NA sequence
  source 1..366: mol_type = other DNA
atgcgtaagcttaatacgattcagaagaggaacaaccttaatactgtgtacgcagtggatgaaaagggcattggaaatgccaaccatgtttacaatgttattgtaactgatggtcagggtaatgagactccatattctattgctttccagaatggtcctcgcaaggaaatgaattcaatccatggacttcttgacacagaccttcttgagattgttcgtgaccgtcttcagggatttcagtctggtgagtttgcttgccgtgagaatgcgattgcacttactcatctcgaagagtgtttgctctggatgaatcttcgtgttgaaaatcgtgcagaacgtggagtacttggtacttctaataagtaa

SEQ ID NO: 230 - DNA, 366 bp, synthetic construct
  misc_feature 1..366: note = TAD1 homologous NA sequence
  source 1..366: mol_type = other DNA
atgcgtaagcttaatacgattcagaagaggaacaaccttaatactgtgtacgccgttgatgaaaagggcgttggcaatgccaatcatgtttacaatgttattgtaactgatggtcagggtaatgagactccatattctattgctttccaaaatggtcctcgcaaggaaatgaattcaattcatggacttcttgacacagaccttcttgagattgttcgtgaccgtcttcagggtttccagtctggtgaatttgcttgtcgtgaaaatgcgattgcacttactcatctcgaagagtgtttgctctggatgaataagagagttgaagaccgtgcagaacgtggagtacttggtacttctaataaataa

SEQ ID NO: 231 - DNA, 366 bp, synthetic construct
  misc_feature 1..366: note = TAD1 homologous NA sequence
  source 1..366: mol_type = other DNA
atgcgtaagcttaatacgattcagaagaggaacaaccttaatactgtgtatgcagtagatgaaaagggcattggtaatgccaatcatgtttacaatgttgttgtaactgatggtcagggtaatgagactccctattctattgctttccagaatggccctcgcaaggaaatggattcaattcatggacttcttgacacagaccttcttgagattgttcgtgaccgtcttcagggttttcagtctggcgagtttgcttgtcgtgagaatgcgattgcacttactcatctcgaagagtgtttgctctggatggacaagagagttgaagaccgtgcagaacgtggagtacttggtacttctaataagtaa

SEQ ID NO: 232 - DNA, 366 bp, synthetic construct
  misc_feature 1..366: note = TAD1 homologous NA sequence
  source 1..366: mol_type = other DNA
atgcgtaagcttaatacgattcagaagaggaataatcttaacactgtgtacgccgttgatgaaaagggcgttggcaatgccaatcatgtttacaatgttattgtaactgatggtcagggtaatgagactccatattctattgctttccaaaatggccctcgcaaggaaatgaattcaattcatggacttcttgacacagaccttcttgagattgttcgtgaccgtcttcagggatttcagtctggcgagtttgcttgtcgtgaaaatgcgattgcacttactcatctcgaagagtgtttgctctggatgaataagagagttgaagaccgtgcagaacgtggagtacttggtacttctaataaataa

SEQ ID NO: 233 - DNA, 366 bp, synthetic construct
  misc_feature 1..366: note = TAD1 homologous NA sequence
  source 1..366: mol_type = other DNA
atgcgtaagcttaatactattcagaagaacaataatctcaacactgtttatgcagttgatgaaaagggtgtgggtaatgccaaccatgtttacaatgttattgtaactgatggtcagggcaatgagactccttattcgattgctttccagaacggtccgcgtaaggaaactgattctattcatggtcttcttgatacagaccttcttgagattgttcgcgaccgtcttcagggttttcagtctggtgaatttgcttgtcgtgaaaatgcactagcacttactcatttggaagaatgcttattgtggatgaatcttcgtgttgagaatcgtgcagaacgtggagtacttggtacttctaacaagtaa

SEQ ID NO: 234 - DNA, 369 bp, synthetic construct
  misc_feature 1..369: note = TAD1 homologous NA sequence
  source 1..369: mol_type = other DNA
atgcgtacaatcaccgatcacgtcgtcaacccggaaaacgaccaactgagcatcgacgtacttgacgatcccggtgcgggcggcgcgaatcacctttacgcaattgacggctacgtcggcaagagtggaaaccgaaccacattgattgaatttcagaatggtcccatctctgaagtcggcgtcaacggcatcacacacgaagctttgctcgcgatagtcgctgaccgtctgcgctcgcttcaggccggtccgtttgcctgccgtgaaaacgcgcttgcgctgacgaagatcgaagaagcacagcactggttgcagcatcgcaccctgtcccgcatgcgtcgcggcgtcgaaggtacgcacacggtttga

SEQ ID NO: 235 - DNA, 369 bp, synthetic construct
  misc_feature 1..369: note = TAD1 homologous NA sequence
  source 1..369: mol_type = other DNA
atgcgtacgatcaccgatcacgtcgtcaacccggcaaacgacaaactgaacatcgacgtacttgacgatcccggtgcgagcggcgcgaatcacctttacgcaatcgacggttacgtcggcaagagtggacaccgaaccacattgattgaatttcagaacggtcccatctctgaagtcggcgtcaacggcatcacacacgaagctttgctcgcgatagtcgctgaccgtctgcgctcgtttcaggccggtccgtttgcctgccgtgaaaacgcgcttgcgctgacgaagatcgaagaagcacagcactggttgcagcatcgcaccctgtcccgcatgcgtcgcggcgtcgaaggtacgcacacggtttga

SEQ ID NO: 236 - DNA, 369 bp, synthetic construct
  misc_feature 1..369: note = TAD1 homologous NA sequence
  source 1..369: mol_type = other DNA
atgcgtctagtcacggatcatgttgtcaatcctgtcaatgaccagctcacgatcgaagtcatcgacgagcccggtagcggtggggctaatcacctctacgaggtttccggctatcgaggccagagcgggcacgaaggcgcgcttattgagtttcaaaacggtccgatcgccgaggttggtgtcaacggactgacgcatgaggttctactcgcgatcgtcgccgatcgcctgcgctcgtttcagaaaggcccgttcacgtgcaaggccaacgcctgcgcgctgacgcacatcgaggaagcgcagcactggttacagcagcgcacactcgagcgcatgcgccgcggcgtcgaaggcacacataccgtctga

SEQ ID NO: 237 - DNA, 420 bp, synthetic construct
  misc_feature 1..420: note = TAD1 homologous NA sequence
  source 1..420: mol_type = other DNA
atgcgtgagatcacgacccatcgcgtgaacccggcgaacgacaggttggtcattgaggtgctggacgagccggggtctggtggcgccaatcacctctacgaggtttcggggttcgattacgcaaccaacgcctcggctggtccgcatcatgtcgagggtagtgccctcgtagtcctctttcagaatggaccgatcgccgaggctggcgtcaacggcgtcacgcaggaagtgcttctcgccatcgtcatcgaccgcctgcgctcgttccagcgcggcccgtatgcctgccgagagaacgcgctggccctgaccaagatcgaagaggctcagcactggctgctcgcccgcactcgcgatcggatggcgaagggcgtcgagggcacccacgccaagcgcgaggacgagggcgcggcggcctga

SEQ ID NO: 238 - DNA, 375 bp, synthetic construct
  misc_feature 1..375: note = TAD1 homologous NA sequence
  source 1..375: mol_type = other DNA
atggaaaaactgtcaaccattcaaaagcgtaataacctgaacaccgtctaccgcgttgaagatcaaggcccaggcggtggataccacgactactttatttacccatcagactgcgacccagagacaatggagctcccgctcgccgttgtcgagttccagaatggcccgagaaacgaccctaacgcccgtcacggcgttctggacagcgacctgcttgagattgtccgcgaccgcttgaaatcctttcaggaaggttctatggcgaccagagagaacgctattgcactacagcatgtggaggaagcattgctatggatgaacaagagagtagaggatcgcgcggagcggaatgtcctcggaaccatgaaaaagtaa

SEQ ID NO: 239 - DNA, 375 bp, synthetic construct
  misc_feature 1..375: note = TAD1 homologous NA sequence
  source 1..375: mol_type = other DNA
atggaaaacaaggaaaaaatcaattttagaattcaaagaaccgacaacctcaatgatatttacgtagataacgttgtaggtcctggaaacgggcgtcatagctatatgattgtcaaaaaggataatcccgaagaagtattgctcgaaatccaatatcaatgcggcgcgaggaaagacgaaaactctgtttcgggaatattggatcaagacctcttggaaattgtacgcaatcggttgcagtattttcaaaaaggagaatatgctacccgtgaaaacgcctgtgcattgacgcatatagaagaagcgttgatgtggatggcaaaaagatcgaacgacagagccgagagaggcgtgctcggaactatgaataaataa

SEQ ID NO: 240 - DNA, 381 bp, synthetic construct
  misc_feature 1..381: note = TAD1 homologous NA sequence
  source 1..381: mol_type = other DNA
atggaaaacagaaagctgatacgcattcagacagaaaacaacctcaacgaggtatacgcagtagacgagcccggtgcaggcaacgcaagtcatgagtaccgcatctcgcctactggctgtgatgagcagggcaatatgtaccccagtcaggatatcagcttccagaacggaccgaggaaagaccctaacagcatcccgggtgtactggacactgatctgttggagatcgtccgcgacaggctcaaaggtttccagagcggcgagttcgcctgccgtgaaaatgcttgtgctctcacccacatcgaagaagcgctcatgtggatgaacaagcgtgtaactgacagagcacagcgcggtgtactcggaaccaacaacaagtga

SEQ ID NO: 241 - DNA, 372 bp, synthetic construct
  misc_feature 1..372: note = TAD1 homologous NA sequence
  source 1..372: mol_type = other DNA
atggaaaacattaaacaactgacggaaaccattcaaagagaagacaatctcaatatcgtcgaatatgacgatacaccttctcacggcaatgggagacacaattatatcatcagacataaagagtctggcgcaattctcggagaaatccattttcaggacggcgggagaaataccgaaggcgtaagagacggagttctcgaccaagatttacttgaaatagttcggcatagattgcaatgttttcaacagggagagttcccgtcgagagaaggcgcacttgctattacgcatattgaagaggctctcttatggttgaataaacgaaaagaggatagaaagtatcgcggagttctcggtaaggacttaaagtga

SEQ ID NO: 242 - DNA, 372 bp, synthetic construct
  misc_feature 1..372: note = TAD1 homologous NA sequence
  source 1..372: mol_type = other DNA
atggaaaacattaaacaactgacggaaaccattcaaagagaagacaatctcaatatcgtcgaatatgacgatataccttctcacggcaatgggagacacaattatatcatcagacataaagagtctggcgcaattctcggagaaatccattttcaggacggcgggagaaataccgaaggtgtaagagacggagttctcgaccaagatttacttgaaatagttcgacatagattgcaatgttttcaacagggagagttcccgtcgagagaaggcgcacttgctattacgcatattgaagaggctctcttatggttgaataaacgaaaagaggatagaaagtatcgcggagttctcggtaaggacttaaagtga

SEQ ID NO: 243 - DNA, 360 bp, synthetic construct
  misc_feature 1..360: note = TAD1 homologous NA sequence
  source 1..360: mol_type = other DNA
atggaaaagctatcgacgattcaaaagcacaataacccgcacgccatccttcggagtgatgacgaaggacccggaggcggctatcacgattacactgtgatggatgtggacagaaaaagtgtgattgcacagataaaatttcagaaaggagcacgaaatgacccgaatgcgcgtcatggtattttggacgctgaccttttggaaatcgtgcgtgataggctgacggccttcaacaagggcgaatttgccacgcgggagaacgcctgcgcaatcacgcatattgaagaagccctcatgtggatggcgaaacgcgccgatgaccgggcagagcgcggcgtactggggacgtataacaaatga

SEQ ID NO: 244 - DNA, 360 bp, synthetic construct
  misc_feature 1..360: note = TAD1 homologous NA sequence
  source 1..360: mol_type = other DNA
atggaaaagctatcgacgattcaaaagcacaataacccgcacgccatccttcggagtgatgacgaaggacccggaggcggctatcacgattacactgtgatggatgtggacagaaaaagtgtgattgcacagataaaatttcagaaaggcgcacgaaatgacccgaatgcgcgtcatggtattttggacgctgaccttttggaaatcgtgcgtgataggctgacggccttcaacaagggcgaatttgccacgcgggagaacgcctgcgcaatcacgcatattgaagaagccctcatgtggatggcgaaacgcgccgatgaccgggcagagcgcggcgtactggggacgtataacaaatga

SEQ ID NO: 245 - DNA, 360 bp, synthetic construct
  misc_feature 1..360: note = TAD1 homologous NA sequence
  source 1..360: mol_type = other DNA
atggaaaagctatcgacgattcaaaagcacaataacccgcacgccatccttcggagtgatgacgaaggacccggaggcggctatcacgattacactgtgatggatgtggacagaaaaagtgtgattgcacagataaaatttcagaaaggcgcacgaaatgacccgaatgcgcgtcatggtattttggacgctgaccttttggaaatcgtgcgtgataggctgacggccttcaacaagggtgagtttgccacgcgggagaacgcctgcgcaatcacgcatattgaagaagccctcatgtggatggcgaaacgcgccgatgatcgggcggagcgcggcgtactggggacgtataacaaatga

SEQ ID NO: 246 - DNA, 360 bp, synthetic construct
  misc_feature 1..360: note = TAD1 homologous NA sequence
  source 1..360: mol_type = other DNA
atggaaaagctatcgacgattcaaaagcacaataacccgcacgccatccttcggagtgatgacgaaggacccggaggcggctatcacgattacactgtgatggatgtggacagaaaaagtgtgattgcacagataaaatttcagaaaggcgcacgaaatgacccgaatgcgcgtcatggtattttggacgctgaccttttggaaatcgttcgtgataggctgacggccttcaacaagggcgaatttgccacgcgggagaacgcctgcgcaatcacgcatattgaagaagccctcatgtggatggcgaaacgcgccgatgaccgggcagagcgcggcgtactggggacgtataacaaatga

SEQ ID NO: 247 - DNA, 360 bp, synthetic construct
  misc_feature 1..360: note = TAD1 homologous NA sequence
  source 1..360: mol_type = other DNA
atggaaaagctatcgacgattcaaaagcgcaataacctgaacacaatctaccgcagcgccgaaaaaggtcccggtggcggataccacagttacacagtcatggatgcaggagggacgaaggtggtagcgcaaatcgagtttcagaaaggcgcacgaaatgacccaaacgcgcggcgtggtgttttggacgctgatcttttggaaatcgtgcgtgataggctgacggcgttcaacaagggagaattcgctacgcgcgaaaatgcctgcgcgatcacgcacattgaggaagccttgatgtggatggcgaaacgcgccgatgaccgggcagagcgcggcgtactggggacatataacaagtga

SEQ ID NO: 248 - DNA, 360 bp, synthetic construct
  misc_feature 1..360: note = TAD1 homologous NA sequence
  source 1..360: mol_type = other DNA
atggaaaagctatcgacgattcaaaagtgcaataacctgaacacaatctaccgcagcaccgaaaaaggtcccggtggcggatatcacagttacacggtcatggatgcagacgggacaaaagtggtggcacaaatcgaattccagaaaggtgctcgaaacgacccgaatgcgcgtcatggcattttggatgctgaccttttggaaatcgtgcgtgataggctgacggccttcaacaagggggaattttccacgcgggagaacgcctgcgcaatcacacatattgaagaagccctcatgtggatggcgaaacgtgccgatgatcgggcggaacgcggggtgttggggacgtataacaaatga

SEQ ID NO: 249 - DNA, 360 bp, synthetic construct
  misc_feature 1..360: note = TAD1 homologous NA sequence
  source 1..360: mol_type = other DNA
atggaaacagtcaagctagaaaatgagcttctcaccgagaagtacacctacattatgcacgaggccgagcccgagtataatgccccgcatcacttcaccgtgcataacgccaaaaccggagaggttctcaacgagatacatttccaatgcggccccataaaagaaaagggtgtgaatggcgtaaacaacgaggacttgctcaatatggtggcggcaaggctgcgaggattccaagccagtgaattctgctgcagagaaaacgccatggcgttgaccaagatagaagaagccttgatgtggctgcgcaagcgcaccatagccagggtaagaagaggtgtagagggaacgcatacagtctaa

SEQ ID NO: 250 - DNA, 330 bp, synthetic construct
  misc_feature 1..330: note = TAD1 homologous NA sequence
  source 1..330: mol_type = other DNA
atggaaactaccaaatacaacgcactagaagaattgcacaacgaactgaatcgcggtacgccaggcgatgaagtttctcttaatatcggcggcaaagaggtactgaaaatcaagtttcaaactggcggcacagctactacagagcgtaacggtgtatttatcgaggacttgcttattgtcgcttacgcaaaattagcaggctacaatcgagagttgccgtgccgcgaaaacagtgtggctcttacaaaaatcgaggaagctatcatgtggctggctaatcgcaaagctgagcgtgaagctcgcggtgtgtatggcactgagaaacgttga

SEQ ID NO: 251 - DNA, 330 bp, synthetic construct
  misc_feature 1..330: note = TAD1 homologous NA sequence
  source 1..330: mol_type = other DNA
atggaaactaccaaatataacgcactagaagaattacacaatgaactgaatcgcggcacaccaggcgatgaagtttctcttaatatcggtggcaaagaggtgctgagaatcaagtttcaaactggcggcacagctactacagaacgcaacggtgtatttatcgaggacttgcttattgtcgcttacgcaaaattagcaggctacaatcgagagttgccgtgccgcgaaaacagtgtggctcttacaaaaatcgaggaagctattatgtggctggctaatcgcaaagctgagcgtgaagctcgcggtgtgtatggcactgagaaacgttga

SEQ ID NO: 252 - DNA, 330 bp, synthetic construct
  misc_feature 1..330: note = TAD1 homologous NA sequence
  source 1..330: mol_type = other DNA
atggaaactaccaaatataacgcactagaagaattacacaatgaactgaatcgcggtacaccaggcgatgaagtttctcttaatatcggcggcaaagaggtgctgaaaatcaagtttcaaactggcggtacagctgctacagagcgtaacggtgtatttatcgaggacttgcttattatagcttacgcaaaactagcaggctacaatcgagagttgccgtgccgcgaaaacagtgtagcccttacgaaaatcgaggaagctatcatgtggctggctaaccgcaaagctgagcgtgaagctcgcggtgtgtacggcactgaggagaagtag

SEQ ID NO: 253 - DNA, 330 bp, synthetic construct
  misc_feature 1..330: note = TAD1 homologous NA sequence
  source 1..330: mol_type = other DNA
atggaaactaccaaatataacgcactagaagaattacacaatgaactgaatcgcggtacaccaggcgatgaagtttctcttaatatcggcggcaaagaggtgctgaaaatcaagtttcaaactggcggtacagctgctacagagcgtaacggtgtatttatcgaggacttgcttattatagcttacgcaaaactagcaggctacaatcgagagttgccgtgccgcgaaaacagtgtagcccttacgaaaatcgaggaagctatcatgtggctggctaatcgcaaagctgagcgtgaagctcgcggtgtgtatggcactgaggagaagtag

SEQ ID NO: 254 - DNA, 330 bp, synthetic construct
  misc_feature 1..330: note = TAD1 homologous NA sequence
  source 1..330: mol_type = other DNA
atggaaactaccaaatataacgcactagaagaattacacaatgaactgaatcgcggtacaccaggcgatgaagtttctcttaatatcggcggcaaagaggtgttgagagtcaaatttcaaactggcggaaccgctacaaccgaaaagagcggcgtattcattgaagatttactgattgtagcttacgcaaaactaaacgaatacaataagtatttgccgtctcgcgagaatagcctggctctcacgaaaattgaggaagctattatgtggctggctaatcgcaaagctgagcgtgaagctcgcggcgtgtatggcactgaggagaagtag

SEQ ID NO: 255 - DNA, 330 bp, synthetic construct
  misc_feature 1..330: note = TAD1 homologous NA sequence
  source 1..330: mol_type = other DNA
atggaaactaccaaatataacgcactagaagaattacacaatgaactgaatcgcggtacaccaggcgatgaagtttctcttaatatcggcggcaaagaggtgttgagagtcaaatttcaaactggcggtacagctactacagaacgtaatggcgtatttatcgaggacttgcttattgtcgcttacgcaaaattagcaggctacaaccgagaactgccttgccgcgaaaacagtgtggctcttacaaaaatcgaggaagctatcatgtggctggctaatcgcaaagttgagcgtgaagttcgcggtgtatacggcactgaggagaaatag

SEQ ID NO: 256 - DNA, 330 bp, synthetic construct
  misc_feature 1..330: note = TAD1 homologous NA sequence
  source 1..330: mol_type = other DNA
atggaaactaccaaatataacgcactagaagaattacacaatgaactgaatcgcggtacaccaggcgatgaagtttctcttaatatcggtggcaaagaggtgctgaaaatcaagtttcaaactggcggcacagctgctacagagcgtaacggtgtatttatcgaggacttgcttattgtcgcttacgcaaaattagcaggctacaatcgagagttgccgtgccgcgaaaacagtgtggctcttacaaaaatcgaggaagctattatgtggctggctaatcgcaaagctgaacgtgaagctcgcggtgtgtacggcactgaggagaagtag

SEQ ID NO: 257 - DNA, 330 bp, synthetic construct
  misc_feature 1..330: note = TAD1 homologous NA sequence
  source 1..330: mol_type = other DNA
atggaaactaccaaatataacgcactagaagaattgcacaacgaactgaatcgcggtacgccaggcgatgaagtttctcttaatatcggcggcaaagaggtactgaaaatcaaatttcaaactggcggtacagctactacagaacgcaacggtgtattcatcgaggacttgcttattgtagcttacgcaaaactagcgggctacaaccgagaactgccttgccgcgaaaacagtgtagctctcacaaaaattgaggaagctatcatgtggctagctaatcgcaaagctgagcgtgaagctcgcggcgtgtacggcactgaggagaagtag

SEQ ID NO: 258 - DNA, 330 bp, synthetic construct
  misc_feature 1..330: note = TAD1 homologous NA sequence
  source 1..330: mol_type = other DNA
atggaaactaccaaatataacgcgctagaagaattacacaatgaactgaatcgcggcacgccaggcgatgaagtttctcttaatatcggtggcaaagaggtgctgaaaatcaagtttcaaactggcggcacagctactacagagcgtaacggtgtatttatcgaggacttgcttattgtagcttacgcaaaactagcgggctacaaccgagaattgccttgtcgcgaaaacagtgtggctcttacaaaaatcgaggaagctattatgtggttggctaaccgtaagactgagcgtgaagctcgcggcgtgtacggcactgaggagaagtag

SEQ ID NO: 259 - DNA, 330 bp, synthetic construct
  misc_feature 1..330: note = TAD1 homologous NA sequence
  source 1..330: mol_type = other DNA
atggaaactaccaaatataacgcgctagaagaattacataatgaactgaatcgcggcacaccaggcgatgaagtttctcttaatatcggtggcaaagaggtactgaaaatcaaatttcaaactggcggcacagctactacagaacgcaatggtgtatttatcgaggacttgcttattgtcgcttacgcaaaattagcaggctacaatcgagagttgccgtgccgcgaaaatagtgtggctcttacaaaaatcgaggaagctattatgtggctggctaatcgcaaagctgagcgtgaagctcgcggtgtgtatggtactgaggagaaatag

SEQ ID NO: 260 - DNA, 330 bp, synthetic construct
  misc_feature 1..330: note = TAD1 homologous NA sequence
  source 1..330: mol_type = other DNA
atggaaactaccaaatataacgcgctagaagaattgcataatgaactgaatcgcggcacaccaggcgatgaagtctctcttaatatcggcggcaaagaggtactgaaaattaagtttcaaactggaggcacagctactacagaacgcaatggtgtatttatcgaggacttgcttattgtcgcttacgcaaaattagcaggctacaatcgagagttgccgtgccgcgaaaatagtgtggctcttacaaaaatcgaggaagctattatgtggctggctaatcgcaaagctgagcgtgaagctcgcggtgtgtatggtactgaggagaagtag

SEQ ID NO: 261 - DNA, 330 bp, synthetic construct
  misc_feature 1..330: note = TAD1 homologous NA sequence
  source 1..330: mol_type = other DNA
atggaaactaccaaatataacgcgctagaagaattgcataatgaactgaatcgcggcacaccaggcgatgaagtttctcttaatatcggcggcaaagaagtactgaaaatcaagtttcaaactggcggcacagctaccacagaacgcaacggtgtatttattgaggacttgcttattgtcgcttacgcaaaactagcaagctacaatcgagagttgccgtgccgcgaaaacagtgtggctcttacaaaaatcgaggaagctatcatgtggctggctaatcgcaaagctgagcgtgaagctcgcggtgtgtatggcactgaggagaagtag

SEQ ID NO: 262 - DNA, 330 bp, synthetic construct
  misc_feature 1..330: note = TAD1 homologous NA sequence
  source 1..330: mol_type = other DNA
atggaaactaccaaatataacgcgctagaagaattgcataatgaactgaatcgcggcacaccaggcgatgaagtttctcttaatatcggcggcaaagaggtgctgagaatcaaatttcaaactggcggaaccgctactacagaacgcaatggcgtatttatcgaggacttgcttattgtagcttacgcaaaactagcgggctacaaccgagaattgccttgtcgcgaaaacagtgtggctcttacaaaaatcgaggaagctattatgtggctggctaatcgcaaagctgaacgtgaagctcgcggtgtatacggcactgaggagaagtag

SEQ ID NO: 263 - DNA, 330 bp, synthetic construct
  misc_feature 1..330: note = TAD1 homologous NA sequence
  source 1..330: mol_type = other DNA
atggaaactaccaaatataacgcgctagaagaattgcataatgaactgaatcgtggcacaccaggtgatgaagtctctcttaatatcggcggcaaagaggtactgaaaattaagtttcaaactggcggcacagctactacagaacgcaatggtgtatttatcgaggacttgcttattgtcgcttacgcaaaattagcaggctacaatcgagagttgccgtgccgcgaaaatagtgtggctcttacaaaaatcgaggaagctattatgtggctggctaatcgcaaagttgagcgtgaagctcgcggtgtgtacggcactgaggagaagtag

SEQ ID NO: 264 - DNA, 330 bp, synthetic construct
  misc_feature 1..330: note = TAD1 homologous NA sequence
  source 1..330: mol_type = other DNA
atggaaactaccaaatataatgcactagaagaactgcacaatgaactgaatcgcggcacgccaggcgacgaagtttctcttaatatcgcgggcaaagaggtgttgaaaatcaagtttcaaactggcggcacagctaccacagaacgcaacggtgtatttattgaggacttgcttattgtagcttactcaaaactagcagactacaaccgaggattgccttgtcgtgaaaacagtttagctcttacgaaaattgaggaagctattatgtggctggctaatcgtaaggttgagcgtgaatctcgcggcgtgtacggtactgaggaaaaatag

SEQ ID NO: 265 - DNA, 330 bp, synthetic construct
  misc_feature 1..330: note = TAD1 homologous NA sequence
  source 1..330: mol_type = other DNA
atggaaactaccaagtataacgcgctagaagaattgcataatgaactgaatcgcggcacaccaggcgatgaagtttctcttaatatcggcggcaaagaggtgttgagagtcaaatttcaaactggcggtacagctgccacagaacgcaacggtgtatttatcgaggacttgcttattataacttacgcaaaactagcaggctacaatcgagagctgccgtgccgcgaaaacagtgtggctcttacaaaaatcgaggaagctatcatgtggctggctaatcgcaaagctgagcgtgaagctcgcggcgtgtatggcactgaggagaagtag

SEQ ID NO: 266 - DNA, 330 bp, synthetic construct
  misc_feature 1..330: note = TAD1 homologous NA sequence
  source 1..330: mol_type = other DNA
atggaaactatcaagtataatgcgctagaagaattgcataacgaactgaatcgcggcacaccaggcgatgaagtttctcttaatatcggcggcaaagaggtgctgaaaatcaagtttcaaactggcggtacagctgctacagagcgtaacggtgtatttatcgaggacttgcttattataacttacgcaaaactagcaggctacaatcgagagttgccgtgccgcgaaaacagtgtagcccttacgaaaatcgaggaagctatcatgtggctggctaaccgcaaagctgagcgtgaagctcgcggtgtgtacggcactgaggagaagtag

SEQ ID NO: 267 - DNA, 330 bp, synthetic construct
  misc_feature 1..330: note = TAD1 homologous NA sequence
  source 1..330: mol_type = other DNA
atggaaactatcaagtataatgcgctagaagaattgcataatgaactgaatcgcggcacgccaggcgatgaagtttctcttaatatcggtggcaaagaggtgctgaaaatcaagtttcaaactggcgacacggctactacagagcgtaacggtgtatttatcgaggacttgcttattatagcttacgcaaaactagcgggctacaatcgagagttgccgtgccgcgaaaacagtgtggctcttacaaaaatcgaggaagctatcatgtggctggctaatcgcaaagttgagcgtgaagttcgcggtgtgtacggcactgaggagaagtag

SEQ ID NO: 268 - DNA, 327 bp, synthetic construct
  misc_feature 1..327: note = TAD1 homologous NA sequence
  source 1..327: mol_type = other DNA
atggaaactttacatacaaaaataatcccaggagatatagaatttaattctcctacatcttataaaataattcataaaaaaactgataagattactcaaaatataaatatacaaaagggcccggttaaagaaaatggcttaaatggaatttttatagaagatttaattcttatctgtataaaccaattggaacattttcaaaatagcgaatttaaatgcaaagataatgaagctactttaagacatttacaagatgctttagcaacaactagagcgagacaatatgaaagacaattaagaaatgtacaaggcaaaaatttaaaataa

SEQ ID NO: 269 - DNA, 369 bp, synthetic construct
  misc_feature 1..369: note = TAD1 homologous NA sequence
  source 1..369: mol_type = other DNA
atggaaattaaaaacggtttatgcacacagaaatatacaaaggtatatgcagaggataaagaaaaatggaagtttaatgcaccacatcattttattgttggtaaagcagattgcgaggatgaatatatagaaccaattgaatatgttaactttcaagaaggtccaataaaagagtacggaataaatggagtaaataacgaagatttaattctcatggttataacaaggctacaagctttccaagatagtccttacaaatgcagagagaacgctatggctataactaaactacaagagtgcttaatgtggttaggaaaaagaacgctagacagagaggttaaaggaattgaaggcacaagcgagatctaa

SEQ ID NO: 270 - DNA, 381 bp, synthetic construct
  misc_feature 1..381: note = TAD1 homologous NA sequence
  source 1..381: mol_type = other DNA
atggaagaagttaaaatgacaaaagaaatggtaaaagtagagcatgatttattaacagagcgttgtacaaaggtatatcgtgaaaaggaatcaagtttccacgcaccacatttattcactgtaacatcggctgaggacgataaaacattagcagttattcacttccaagaaggtgcattaaacgttgcaggagttaacggagtaatgaatgaagacttacttgttatgatcttaactcgtttacaaagtttccaagatagtgagtttgcttgcaaagagaacgcaatggcaattacaaagattgaagaagcgttactatggttacgtaaacgtacaatgggacgagaaaaacgaggagtacttggtactcacactaagtag

SEQ ID NO: 271 - DNA, 381 bp, synthetic construct
  misc_feature 1..381: note = TAD1 homologous NA sequence
  source 1..381: mol_type = other DNA
atggaagaagttaaaatgacaaaagaaatggtaaaagttgaacatgatttattaacagaacgagttacaaaggtataccgtgaaaaggaatcaagtttccacgcaccacacttattcactgtaacatctgctgaagacgacaaaacattagcagttatccacttccaagagggcgcattaaacgttgcaggagtcaacggagtaatgaatgaagacttactagttatgatcctaactcgactacaaggtttccaaaacagtgagtttgcttgcaaagagaatgcaatggcaatcaccaagattgaagaagcgttactatggttacgtaaacgtacaatgggacgagaaaaacgtggtgtactaggaacacatacgaagtag

SEQ ID NO: 272 - DNA, 381 bp, synthetic construct
  misc_feature 1..381: note = TAD1 homologous NA sequence
  source 1..381: mol_type = other DNA
atggaagaagttaaaatgacaaaagaaatggtaaaagttgaacatgatttattatcagagcgctttacaaaggtatatcgtgaaaaggaatcaagcttcaatgcaccacacttattcactgtaacaactgccgaagatgacaaaacattaggtgttatccacttccaagaaggtgcgatccaagagcacggtgtcaacggtgtaatgaacgaagacttaatccatatggttattgaacgtctacagtgcttccaagctagtgagtttaactgccgagagaacgcaatggcaatcacgaagttagaagaagcgatgctatggttacgtaaacgcacgatgggacgagacaaacgaggagttcttggaacccacgttaaatag

SEQ ID NO: 273 - DNA, 381 bp, synthetic construct
  misc_feature 1..381: note = TAD1 homologous NA sequence
  source 1..381: mol_type = other DNA
atggaagaagttaaaatgacaaaagaaatggtaaaggtagaacatgatttattaacagaacgagttacaaaggtatatcgtgaaaaggaatcaagtttccacgcaccacacttattcactgtaacatctgctgaggacgacaaaacattagcagttatccacttccaagagggcgcattaaacgttgcaggagttaacggagtaatgaatgaagacttactagttatgatcctaactcgattacaaggcttccaaaatagtgagtttgcttgtaaagagaatgaaatggcaattacgaagattgaagaagcgttactatggttacgtaaacgtacaatgggacgagagaaacgtggcgtactaggaacacatacgaagtag

SEQ ID NO: 274 - DNA, 381 bp, synthetic construct
  misc_feature 1..381: note = TAD1 homologous NA sequence
  source 1..381: mol_type = other DNA
atggaagaagttaaaatgacgaaagaaatggtaaaagtagaacatgacttattaacagagcgtgttacaaaggtatatcgtgaaaaggaatcaagctttaaggcaccacacttgttcactgtaacatctgccgaggatgacaaaacactatcagttattcacttccaagaaggtgcattaaacgttgcaggagttaacggagtaatgaatgaagacttactagttatgatcctagttcgtttacaagctttccaagatagtgagtttgcttgcaaagagaatgcaatggcaatcacaaagattgaagaagcgttactatggttacgtaaacgtacaatgggacgagaaaaacgtggtgtattaggaacacacgctaagtag

SEQ ID NO: 275 - DNA, 357 bp, synthetic construct
  misc_feature 1..357: note = TAD1 homologous NA sequence
  source 1..357: mol_type = other DNA
atggaattagtaaaactcacaaatggattgcttactgaaaaatatactactgtgcatcacgaaaaggattatcagttcaacgcacctcactattttgaggtacatgatttagatgaaaaggtcgttggcagtgttcatttccaagaagggccaatcaaagaggcaggcgtaaatggcgttgctaacgaagatttgatcaatatggttattcgtcgacttgaaggatttcaaaatagtgactaccgttgtcgggagaatgcagtcgcaatcacaaagctggaagaatcattgatgtggttaagaaagagaacgatggatagagaagcgcgaggcgtagaaggaacgcatacagtatag

SEQ ID NO: 276 - DNA, 357 bp, synthetic construct
  misc_feature 1..357: note = TAD1 homologous NA sequence
  source 1..357: mol_type = other DNA
atggaattagtaaagctaacaaatggactgcttactgaaaaatatactactgtgcatcacgaaaaggattatcaattcaatgcaccgcactattttgaggttcatgatcatggcggtaatgtccttggcagtgttcatttccaagaagggccgatcaaagaagctggagtaaacggagtaactaatgaagatttaattggtatggttcttgcccgtcttgaaggattccaaaacagtgactaccgatgccaagataatgcagttgcaatcacaaaactggaagaagcgcttctgtggcttaggaaacgaacactagaacgtgaagcccgaggggtagaaggaacacataccgtttaa

SEQ ID NO: 277 - DNA, 357 bp, synthetic construct
  misc_feature 1..357: note = TAD1 homologous NA sequence
  source 1..357: mol_type = other DNA
atggacgaagtaaagctggttaacggtcttgcaacaagtaaatacactgaggtttatcatgagagggactatagcttcaatgcaccacatcactttgaggtgcgatcagttgagggcgatgtgcttgcagaagtgaacttccaagacggccccattaaagaagcaggcattaacggcgttatgaacgaggatctgattgcaatggttattgctaggctgaatggattccagaacagtgatttccgctgtcgagagaatgctgtagcgattaccaaactggaagagtcgctgatgtggctgcgtaagcgaaccgctgacagagaagcgcgttgtgttgagggtacccatactgtttag

SEQ ID NO: 278 - DNA, 357 bp, synthetic construct
  misc_feature 1..357: note = TAD1 homologous NA sequence
  source 1..357: mol_type = other DNA
atggacggtgacaagaatacgccccagtgctcgcttgacaatctgccgaggcaggagtccccggaaaggctggcgctcaatctgcggctgaaggcgcaggagattctggacaggtgtccccgccacgtgcgcctgacgctggggaacgagttgctcttccagtgtggcccggtcagagagttcggcgtcaacgggtgccagatcgaggacgtgctgacggtgctgatcgaccggctcgaggcgttccaaggtggtcaatacccgagccgtgaagggtcgatcgcgctgatgaagatgcaggaagcgctgatgtggctcaatcggcggacggcggatcggaaggagcggggcgtctag

SEQ ID NO: 279 - DNA, 393 bp, synthetic construct
  misc_feature 1..393: note = TAD1 homologous NA sequence
  source 1..393: mol_type = other DNA
atggagagattaaatactattcaaaaaagagaaaaattaaatgaagtttttgcagttgatgaaaaaggtccagggggagcaaatcatgaatatggaatttatagagatgaaattatttgtagtaattcaataactacagaacatgaaatgaatttaatatcaaaaattcaatttcaaaaaggtgcaaggaatgaggtaagaagtcagcagggggtaattgatactgatttattagagatagtaagagatagattacattgttttcaacaaggagagtttgcatcagaatataattatcaagctctgattcatattgaagaagctcttatgtggttgaatagaagagttgaagatagaatcgaaagaaatgtattaggaacatataataagtaa

SEQ ID NO: 280 - DNA, 369 bp, synthetic construct
  misc_feature 1..369: note = TAD1 homologous NA sequence
  source 1..369: mol_type = other DNA
atggagattaaaaacagtttatgcacacaaaattatactaagctttattgcgaggataaagaagaatggaagtataatgcaccatgttactttatattaggaagggcagaatgtgaggatgattgtatagaaccaattcaatatcttagttttcaagaaggacctataaaagagcagggagttaatggaataaataatgaagatgtaatattagcagttataacaagattagaagcatttcaagatagcccatatgcttgtaaagagaatgagaaggctatagagaagttagaagaatgcttgatgtggcttagaaaaagaactttagatagacaaatgagaaatgttgaaggaactagtggtatttag

SEQ ID NO: 281 - DNA, 369 bp, synthetic construct
  misc_feature 1..369: note = TAD1 homologous NA sequence
  source 1..369: mol_type = other DNA
atggagattaaaaatagtttatgcacacaaaattatactaagctttattgcgaggataaagaagaatggaagtataatgcaccatgttgctttatattaggaagggcagaatgtgaggatgattgtatagaaccaattcaatatcttagttttcaagaaggacctataaaagagcagggagttaatggaataaataatgaagatgtaatattagcagttataacaagattagaagcattccaagacagcccatatgcttgtagagaaaatgagaaggctatagagaagttagaagaatgcttgatgtggcttagaaaaagaactctagatagacaaatgagaagtgttgaaggaactagtggtatttaa

SEQ ID NO: 282 - DNA, 378 bp, synthetic construct
  misc_feature 1..378: note = TAD1 homologous NA sequence
  source 1..378: mol_type = other DNA
atggagctggtaaagatatcaaatggacttcttaccgaaaaatatactactgtccatcacgaaaaggattatcaattcaacgcaccacactattttgaggttcatgatcatagcggtaacgtcctgggcagtgttcatttccaagaaggaccgatccaagaagctggagtaaatggagtgaccaacgaagatttaattgctatggttattgctcgtctggaaggattccaaaacagtgagttccgtaatcgggataatgcagttgcaatcacaaagttggaagaagcgcttctgtggcttagaaaacggacattagaacgcgaagcccgaggcgtggaaggaacacataccaaaaggtcgggttcattatgcacctga

SEQ ID NO: 283 - DNA, 489 bp, synthetic construct
  misc_feature 1..489: note = TAD1 homologous NA sequence
  source 1..489: mol_type = other DNA
atggataaaattaattttatgaatagaaaattatatattgaagatttaataatatatgctctaagaggaattgattatatagaaaccaagaaaggaggcgaattaatgcgaaaattagatacaatacaaactaaagaaaacttaaacgacatctatgcaatagataatattgggccaggtggagcaaatcatcaatatatgattgttccaaatggaactcaagtaacagaagaaacactcaactatggatatttaaataaaatccaaatgcaatgcggcccaagaaatgagacaaatctagaaaatggattactccctaatgatttattagagatagctagagatatactaaaaggttttcaatcaggtgactttgcaaatatatataatgaaaaagcattaggacacattgaaatagctttactatatcttaataaaagagtagaagacagaataaaaagacaggtgttaggcaaatatgaaaaataa

SEQ ID NO: 284 - DNA, 360 bp, synthetic construct
  misc_feature 1..360: note = TAD1 homologous NA sequence
  source 1..360: mol_type = other DNA
atggcaaagctatcgacgattcaaaagcgcaataacctgaacacaatctaccgcagcgccgaaaaaggtcccggtggcggatatcacagctacacggtcatggatgcagacgggacaaaagtggtggcgcaaatcgaattccagaaaggtgctcgaaacgacccgaatgcgcgtcacggtgttttggatgctgaccttttggaaatcgtgcgtgataggctgacggccttcaacaagggcgaatttgccacacgggagaacgcctgcgcaatcacacatattgaggaagccctgatgtggatggcgaaacgcgccgatgaccgggcagagcgcggcgtactggggacgtataacaaatga

SEQ ID NO: 285 - DNA, 360 bp, synthetic construct
  misc_feature 1..360: note = TAD1 homologous NA sequence
  source 1..360: mol_type = other DNA
atggcaaagctatcgacgattcaaaagcgcaataacctgaacacaatctaccgcagcgccgaaaaaggtcccggtggcggatatcacagctacacggtcatggatgcagacgggacaaaagtggtggcgcaaatcgaattccagaaaggtgctcgaaacgacccgaatgcgcgtcacggtgttttggatgctgaccttttggaaatcgtgcgtgataggctgacggccttcaacaagggtgagtttgccacgcgggagaacgcctgcgcaatcacgcatattgaagaagccatcatgtggatggcgaaacgcgccgatgatcgggcggagcgcggcgtactggggacgtataacaaatga

SEQ ID NO: 286 - DNA, 354 bp, synthetic construct
  misc_feature 1..354: note = TAD1 homologous NA sequence
  source 1..354: mol_type = other DNA
atggcttttgaaattgtaaaacttggcacagacaaatacactgaagtattggctgatgctcataaatcttataactgttcaccaaactttgctgtccgtactaaaactactggcaaaatcttagctgatatccattttcaagatggaccagttaaagagaaaggccttaatggcgtagctaatgaagatcttattgttatggttatgcatcgtcttaatcaattgcaagggtctgaatacgcttgcaaagaaactgctgatgctgttaaacatttacaagaggctttagattctttacgtgctcgtactaacaaacgtgaacaacgtggtgttctaggcacatctattaaatag

SEQ ID NO: 287 - DNA, 366 bp, synthetic construct
  misc_feature 1..366: note = TAD1 homologous NA sequence
  source 1..366: mol_type = other DNA
atgggcgaaagaataacaaccgttcagtacaaaggtaatttaaatgaggtttatcgcgttgctgacaagggcgtcggcaatgcttataacgagtatgtcatccggactaaagatgatgaacccgttgaactggccagaattaagtttcaaaaaggagccagaaacgaaccggtatcggaagtaggcgtaatcgattctgatttgcttgaaattgtcagagatcgcttaaagttattccaggaaggtgaatttgagtgtactgaaaatgcgatggcgttagttcatattgaaaccgccattatgtggctaaaccggcgggtggaagatcggatcaaacgtgatgtcatcgggacccataaaaaataa

SEQ ID NO: 288 - DNA, 366 bp, synthetic construct
  misc_feature 1..366: note = TAD1 homologous NA sequence
  source 1..366: mol_type = other DNA
atgggtgagaaaataacaaccgttcagtacaaaggcaatttaaatgaggtttatcgagtcgctgacaagggcgtcggcaatgcttataacgagtatgttattcggactaaagacgatgatccagttgagctggcaagaattaagtttcaaaaaggagccagaaacgaacccatatcggaagtcggcgtcattgattctgatttgcttgagattgtcagagatcgcttaaagctattccaggaaggggagtttgagtgtactgagaatgcgatggccttggtacatattgagacagcgatcatgtggttaaaccgtcgggtggaagatcggatcaaacgtgatgtcatcggaacccataagaaataa

SEQ ID NO: 289 - DNA, 360 bp, synthetic construct
  misc_feature 1..360: note = TAD1 homologous NA sequence
  source 1..360: mol_type = other DNA
atggtaaaactatcgacgattcaaaagcacaataacccgcacgccatccttcggagtgataacgaaggacccggaggcggctatcacgattacactgtgatggatatggacagaaaaagtgtgattgcacagataaaatttcagaaaggcgcacgaaacgacccgaacgcgcgtcatggcgttttagatgctgaccttttggaaatcgtgcgtgataggctgacggccttcaacaagggagaatttgccacgcgggagaacgcctgcgcaatcacacatattgaagaagccctcatgtggatggcgaaacgcgccgatgaccgggcggagcgcggtgtgctcgggacatacaacaagtga

SEQ ID NO: 290 - DNA, 360 bp, synthetic construct
  misc_feature 1..360: note = TAD1 homologous NA sequence
  source 1..360: mol_type = other DNA
atggtaaaactatcgacgattcaaaagcacaataacccgcacgccatccttcggagtgataacgaaggacccggaggcggctatcacgattacactgtgatggatgtggacagaaaaagtgtgattgcacagataaaatttcagaaaggcgcacgaaacgacccgaacgcgcgtcatggcgttttagatgctgaccttttggaaatcgtgcgtgataggctgacggccttcaacaagggagaatttgccacgcgggagaacgcctgcgcaatcacgcatattgaagaagccctcatgtggatggcgaagcgcgccgatgaccgggcggagcgcggtgtgctcgggacatacaacaagtga

SEQ ID NO: 291 - DNA, 360 bp, synthetic construct
  misc_feature 1..360: note = TAD1 homologous NA sequence
  source 1..360: mol_type = other DNA
atggtaaagctatcgacgattcaaaagcacaataacccgcacgccatccttcggagtgataacgaaggacccggaggcggctatcacgattacactgtgatggatgtggacagaaaaagtgtgattgcacagataaaatttcagaaaggcgcacgaaacgacccgaacgcgcgtcatggcgttttagatgctgaccttttggaaatcgtgcgtgataggctgacggccttcaacaagggcgaatttgccacacgggagaacgcctgcgcaatcacacacattgaggaagccctgatgtggatggcgaaacgcgccgatgaccgggcagagcgcggcgtactggggacgtataacaaatga

SEQ ID NO: 292 - DNA, 360 bp, synthetic construct
  misc_feature 1..360: note = TAD1 homologous NA sequence
  source 1..360: mol_type = other DNA
atggtaaagctatcgacgattcaaaagcacaataacccgcacgccatccttcggagtgataacgaaggacccggaggcggctatcacgattacactgtgatggatgtggacagaaaaagtgtgattgcacagataaaatttcagaaaggcgcacgaaacgacccgaacgcgcgtcatggcgttttagatgctgaccttttggaaatcgtgcgtgataggctgacggccttcaacaagggcgaatttgccacgcgggagaacgcctgcgcaatcacgcatattgaagaagccctcatgtggatggcgaaacgcgccgatgatcgagcggaacgcggtgtgctcgggacatataacaagtga

SEQ ID NO: 293 - DNA, 360 bp, synthetic construct
  misc_feature 1..360: note = TAD1 homologous NA sequence
  source 1..360: mol_type = other DNA
atggtaaagctatcgacgattcaaaagcacaataacccgcacgccatccttcggagtgataacgaaggacccggaggcggctatcacgattacactgtgatggatgtggacagaaaaagtgtgattgcacagataaaatttcagaaaggcgcacgaaatgacccgaatgcgcgtcatggcgttttagatgctgaccttttggaaatcgtgcgtgataggctgacggccttcaacaagggcgaatttgccacacgggagaacgcctgcgcaatcacgcatattgaagaagccctcatgtggatggcgaaacgcgccgatgatcgggcggaacgcggggtgttggggacgtataacaaatga

SEQ ID NO: 294 - DNA, 360 bp, synthetic construct
  misc_feature 1..360: note = TAD1 homologous NA sequence
  source 1..360: mol_type = other DNA
atggtaaagctatcgacgattcaaaagcacaataacccgcacgccatccttcggagtgataacgaaggacccggaggcggctatcacgattacactgtgatggatgtggacagaaaaagtgtgattgcacagataaaatttcagaaaggcgcacgaaatgacccgaatgcgcgtcatggtgttttggacgctgaccttttggaaatcgtgcgtgacaggctgacggccttcaacaagggtgagttcgccacgcgggagaacgcctgtgcaatcacacatattgaagaagccctcatgtggatggcgaaacgcgccgatgatcgggcggaacgcggggtgttggggacgtataacaaatga

SEQ ID NO: 295 - DNA, 360 bp, synthetic construct
  misc_feature 1..360: note = TAD1 homologous NA sequence
  source 1..360: mol_type = other DNA
atggtaaagctatcgacgattcaaaagcacaataacccgcacgccatccttcggagtgataacgaaggacccggaggtggctatcacgattacactgtgatggatgtggacagaaaaagtgtgattgcacagataaaatttcagaaaggcgcacgaaacgacccgaacgcgcgtcatggcgttttagatgctgaccttttggaaatcgtgcgtgataggctgacggccttcaacaagggcgaatttgccacgcgggagaacgcctgcgcaatcacacatattgaagaagccctcatgtggatggcgaaacgcgccgatgatcgggcggaacacggggtgttggggacgtataacaaatga

SEQ ID NO: 296 - DNA, 360 bp, synthetic construct
  misc_feature 1..360: note = TAD1 homologous NA sequence
  source 1..360: mol_type = other DNA
atggtaaagctatcgacgattcaaaagcacaataacccgcacgccatccttcggagtgataacgaaggacccggaggtggctatcacgattacactgtgatggatgtggacagaaaaagtgtgattgcacagataaaatttcagaaaggcgcacgaaatgacccgaatgcgcgtcatggcgttttggatgctgaccttttggaaatcgtgcgtgataggctgactgccttcaacaagggcgaatttgccacgagggagaacgcctgcgcaatcacgcatattgaagaagccctcatgtggatggcgaaacgcgccgatgaccgggcagagcgcggcgtgctggggacgtataacaaatga

SEQ ID NO: 297 - DNA, 360 bp, synthetic construct
  misc_feature 1..360: note = TAD1 homologous NA sequence
  source 1..360: mol_type = other DNA
atggtaaagctatcgacgattcaaaagcacaataacccgcacgccatccttcggagtgataacgaaggacccggaggtggctatcacgattacactgtgatggatgtggacagaaaaagtgtgattgcacagataaaatttcagaaaggcgcacgaaatgacccgaatgcgcgtcatggcgttttggatgctgaccttttggaaatcgttcgtgataggctgacggccttcaacaagggcgaatttgccacgcgggagaacgcctgcgcaatcacacatattgaagaagccctcatgtggatggcgaaacgcgccgatgatcgggcggagcgcggcgtactggggacgtataacaaatga

SEQ ID NO: 298 - DNA, 360 bp, synthetic construct
  misc_feature 1..360: note = TAD1 homologous NA sequence
  source 1..360: mol_type = other DNA
atggtaaagctatcgacgattcaaaagcacaataacccgcacgccatccttcggagtgataacgaaggacccggaggtggctatcacgattacactgtgatggatgtggacagaaaaagtgtgattgcacagataaaatttcagaaaggcgcacgaaatgactcgaatgcgcgtcatggtgttttggatgctgaccttttggaaatcgtgcgtaataggctgactgccttcaacaagggcgaatttgccacgagggagaacgcctgcgcaatcacacatattgaagaagccctcatgtggatggcgaaacgcgccgatgatcgggcggaacgcggcgtactggggacgtataacaaatga

SEQ ID NO: 299 - DNA, 360 bp, synthetic construct
  misc_feature 1..360: note = TAD1 homologous NA sequence
  source 1..360: mol_type = other DNA
atggtaaagctatcgacgattcaaaagcacaataacccgcacgccatccttcggagtgataacgaaggacccggaggtggctatcacgattacactgtgatggatgtggacagaaaaagtgtgattgcacagataaaatttcagaaaggtgctcgaaacgacccgaatgcgcgtcgcggtgttttggatgctgaccttttggaaatcgttcgtgataggctgatggccttcaacaagggcgaatttgccacgcgggagaacgcctgcgcaatcacacatattgaagaagccctcatgtggatggcgaaacgcgccgatgatcgggcggaacgcggcgtactggggacgtataacaaatga

SEQ ID NO: 300 - DNA, 360 bp, synthetic construct
  misc_feature 1..360: note = TAD1 homologous NA sequence
  source 1..360: mol_type = other DNA
atggtaaagctatcgacgattcaaaagcacaataacccgcacgccatccttcggagtgataacgaaggactcggaggtggctatcacgattacactgtgatggatgtggacagaaaaagtgtgattgcacagataaaatttcagaaaggtgctcgaaacgacccgaatgcgcgtcgcggtgttttggatgctgaccttttggaaatcgttcgtgataggctgatggccttcaacaagggcgaatttgccacgcgggagaacgcctgcgcaatcacacatattgaagaagccctcatgtggatggcgaaacgcgccgatgatcgggcggaacgcggcgtactggggacgtataacaaatga

SEQ ID NO: 301 - DNA, 360 bp, synthetic construct
  misc_feature 1..360: note = TAD1 homologous NA sequence
  source 1..360: mol_type = other DNA
atggtaaagctatcgacgattcaaaagcacaataacctgaacacgatttaccgcagcgcagaaaaaggtcccggtggcggatatcacagctacacggtcatggatgcagacgggacaaaagtggtggcgcaaatcgaattccaaaaaggcgcacgaaatgacccgaatgcgcgtcatggcgttttggatgctgaccttttggaaatcgtgcgtgataggctgacggccttcaacaaaggagaatttgccacgcgggagaacgcctgcgcaatcacgcatattgaagaagccctcatgtggatggcgaagcgcgccgatgaccgggcggagcgcggtgtgctcgggacatacaacaagtga

SEQ ID NO: 302 - DNA, 360 bp, synthetic construct
  misc_feature 1..360: note = TAD1 homologous NA sequence
  source 1..360: mol_type = other DNA
atggtaatgctatccgtgattcaaaagaacaataacccgcacgccatccttcggagtgataacgaaggacccggagggggctatcacgattataccgtgatggatgtggacagaaaaagtgtgattgcacagatacggtttcaaaaaggtgcgcgaaacgacccgaacgcgagagatggagttttggacgctgatctcctggaaatcgtgcgtgacaggctgacggccttcaacaagggagaatttgccacgcgggagaacgcctgcgcgatcacgcatatcgaagaagccctcatgtggatggcaaagagggcagatgaccgagcagaacgcggcgtactcggcacatacaataagtga

SEQ ID NO: 303 - DNA, 426 bp, synthetic construct
  misc_feature 1..426: note = TAD1 homologous NA sequence
  source 1..426: mol_type = other DNA
atggtaggtgcttttattatacctaaaattaaggaggatttattaatggaaaaattaattacaattcaaaaaagagaaaaattaaatgaggtttatgcggtagatgaaaaaggaaatggtggggcgaatcatgagtatgtgatttcttacgaggtatttccagttggtaaacctaaagaaattcatgaggttgtaactattcaacttcaaaatggagcaagaaaagaagaaaattcaattcatggtgtaattgactcagatttgcttgagattgtaagacatagacttcaatgttttcaagcaggacaattcgcaagtagggagaatgcttgtgcattaactcatattgaagaagcgcttatgtggatgaatagaagagttgaggatagaattgaaagaaatgtattaggtacaaataataagtag

SEQ ID NO: 304 - DNA, 369 bp, synthetic construct
  misc_feature 1..369: note = TAD1 homologous NA sequence
  source 1..369: mol_type = other DNA
atgtacaaattaaataccattcaaaaaagagaaaaattaaacgaggtttatgtattggatgataagggtccaggtggagccaatcatgtttatatgatatgtaaaaaagataaagatattttagacagtgtactagtagatataaattttcaaaaaggacctcgtaaagaaggaagttcaaccaatggtatactagatacagatttattagaaatagtaagaaatagattacaaggttttcaagaaggtccttatgcttgtgaatacaatgaaaaggctcttaaacatatagaagaggctttaatgtggcttaatagacgtgttgaagatagaatagatagaaatgttttaggtacaaataataaataa

SEQ ID NO: 305 - DNA, 360 bp, synthetic construct
  misc_feature 1..360: note = TAD1 homologous NA sequence
  source 1..360: mol_type = other DNA
atgtacaaattaaatactattcaaaaaagagaaaatttgaacaatgtttacccgcatgatgaggagggaaatggtggtgctaatcacgcttatttgattactacagccgataaagctcaaactgtgggttgtattcaatttcaaaatggtgcaagaaaagaagaaggaagtgtgcctggtgtagctaatgaagatctattagagatagtaaggcatagattacaatgtttccaagctggaccttattcaagcagagaaaatgcctgtgcgttaagccacatagaagaagctttaatgtggcttaatagacgtgttgaggacaggatagaaagaaatgtattaggaactaaaaataaataa

SEQ ID NO: 306 - DNA, 360 bp, synthetic construct
  misc_feature 1..360: note = TAD1 homologous NA sequence
  source 1..360: mol_type = other DNA
atgtacaaattagatactattcaaaaaagagaaaaattaaacaaggtttacccgcatgatgaggagggaaatggtggtgctaatcacgcttatttgattaatacagcagataaagctcaaactgtgggttgtattcaatttcaaaatggtgcacgaaaagaagaaggaagtgtgcctggtgtagctaatgaagatctattagagatagtaaggcatagattacaatgtttccaagctggaccctattcaagcagagaaaatgcctgtgcgttaacccacatagaagaagctttaatgtggcttaatagacgtgttgaggacaggatagaaagaaatgtattaggaactaaaaataaataa

SEQ ID NO: 307 - DNA, 387 bp, synthetic construct
  misc_feature 1..387: note = TAD1 homologous NA sequence
  source 1..387: mol_type = other DNA
atgtcaacagaagcaagaaaacttagtacaattcagaagagagaaaagctcaatgacgtctatgcaatgaacgagagaggtaacggcggtgcaaatcatacttatgcggttcataagtgcggaaataatacagtttttgaaactgaaccacttgcagttattcaatttcaggatggagcacgtaagattcctgatagtattcccggtgtgcttgatactgacctgcttgagattgttcgtgaccgtctgaaaggttttcagagtggtgagttttcatgccgtgaaaatgcatgtgctctcactcatattgaggaagctctcatgtggatgaatcgtcgtgttgaggatagaattgaaagagacgtactcggcaccaataataagtaa

SEQ ID NO: 308 - DNA, 294 bp, synthetic construct
  misc_feature 1..294: note = TAD1 homologous NA sequence
  source 1..294: mol_type = other DNA
atgtcaccagagaacaataagtatcgtcttgaaccatttatcggagctgacggggtagcacttgaacaggaagtaattttttacaaaatgaaccttgatggcacaagtgaacctggtaccacacttgaacaaatgctcatcgtgtcaattgctcgccttaatgacctcgataaacgcttcccttgccgtgagaatgcacttgcaatcacgaagatggaagaggcacttatgtggctcaataagcgtacagagaaccgtatctcccgtggagtagaaggaaaacacattatttaa

SEQ ID NO: 309 - DNA, 321 bp, synthetic construct
  misc_feature 1..321: note = TAD1 homologous NA sequence
  source 1..321: mol_type = other DNA
atgtcagactacaacgcaattaaaaaactacatgaagctgtaaaagcggaacaagcagaccactacatagaaaccattaacaacaagcctgtccttgatatccaattccaagtaggtggcactgctacaactgaacgtaatggagtatttattgaagacttgctcatcgtagcatatgcgagactcaatgcattcaataagcagttgccgtcgcgcgagaacagcatagcgcttacgaagattgaggaagctatcatgtggcttgctaatcgcaaaacagagcgtgaactacgtggagtgtacggaactgagcaggagtag

SEQ ID NO: 310 - DNA, 621 bp, synthetic construct
  misc_feature 1..621: note = TAD1 homologous NA sequence
  source 1..621: mol_type = other DNA
atgtctaagaagttattagcattatcaatggttgcatacattggtactaagtcagttttagcaacgcccatgacgcgtggtgaatacaatgaataccaagggtggcaaatccctgaaaatgaagacccaagtgatcctggttatttaatcgaatataaagatggcggcaaagctaatcatcctgatcatgaaggttatatttcttggtcaccaaaggatgtttttgaacattcatatcaaccagatggttttcaaaattgtgtaatgggccgtgaaatccataaagatgataacgaagtaacggttttccataacgaaaccgttaaaacccgagacgatgagcagtctcttgaaccaggtcatttctatgatgtcgtagctggagactcacttactccaattcaattccaacttggtccagttaaggaagttggagttaatggcatcacgaatgaagctttaattgcgattgttttacatcgattacgtgttcttaatgaaaagtttccttgccgtgaaaattcacttgctattactaatattgagcaaggccaaatgtggctagagcaacgtacccgaaatcgtcagaagcgtggtgttgaaggttttaacatcgcataa

SEQ ID NO: 311 - DNA, 1629 bp, synthetic construct
  misc_feature 1..1629: note = TAD1 homologous NA sequence
  source 1..1629: mol_type = other DNA
atgttaaagtattttttaaagttaaaatacattaacacttttattagtttacaatttaaattaaaaaggagtgaaattatgaaagagtatttattacaaaatgtggatgaaaatggaattgtgagaagtgaaaaattatttaaggattctagtccttctggtgaaatgattggtacaaggaattttacaatactattaggtgaagatgaaataaattataatgcacctcatacttatataattcttaataaggaagattttgaaaatgaaaaacattcagtagaatatatagataatagtaaaaatgaaattagaaagattgatgctattacatctaatgctgtgatgggaatggtaaaatttcaaaaaggtccttttaaagaagtgggattaaatggaattttccatgaggatttattagctatagttattaatagattggaacatttccaagcaagtgaattttcttgtgaagaaaatgctaaagctattgagtatttaaaattagctatagaagctttatcatctagaactaaaagaagagataatgctggagtactaggaactaataatgtagatgtgtcatctgaaggaaatgtcgttaaagctttagagaaagttaatagtaaatattatttattttataatcctgatactaagaaaatctattcatttttaacatattttaaagataatgatggaaataatgcttatttagttattgaagctgtgggaaattcaaatgataaaatcataatattaaataaagattatgagatcggtttctttaataaatatgatctggtagaaactaattttcctgtaagtggagattacataatatttagagaagaagatattttatcaactaaagctgaaatcaaatttgatattaatgaaattcctatggagaaagtagaaaaagagaaatctaaaggttataattatctatataataaatcatctggaaaaatatatgcttatatatctgatgattatgatgataatattattcttaaacttataggaaatgatagtgaaagaataactattaaggataaagattatgaaactcagtattttaatagttatgaattatctaatactaactatcctatacaaggaacttattgggtatttactgatgaagatatagtatctgaaaagaatgtagagataaaggaagaagttaaatctgattggaaaggttttaatggagatcaaaaattggaaaagaaaactctagaattagataaagatactaaagttgataaagtaccatttatccctatagttagttataatttaacatctacaactgaaatggtttcagagaaatctgattctacagcagaagagccaagtgttaaagtagcacaaatatctgattactttactttaaaagataaaatatataaagaactagttccttataatgaaggagataaaactataagattagttcaaatagctggaccaggttttgaacctgaaactttggaagttaaagtaagagcgtttgatatagagtatttaggtcatgatgatactgataatgaacgtccattcataggatattatgttaaattaacagaatcagatataatttataatgagtcagaagaataa

SEQ ID NO: 312 - DNA, 372 bp, synthetic construct
  misc_feature 1..372: note = TAD1 homologous NA sequence
  source 1..372: mol_type = other DNA
atgttagcagattacaaagcggaaaactggacagacccagacaaaaaccctacgggtggggccgtgcatggggttggtcttgaaataaaatggcaggaaggcccgggtggggccgtgcatggggttggtcttgaaataaaatggcaggaaggcccgcttggtcgcggcactgaacgaaaagaaccgaacggggcttttgtcgaaacagttatcgacgcatgccgccagcgcattcagttttatcaggactcgaaatttaagtgccgcgagaatgctatcgcaatcacaaagcttgaagaggctctgatgtggctcaataagcgaacgaccgaccgcgagaaacgccaagtcgagggcgaacacaaaatataa

SEQ ID NO: 313 - DNA, 375 bp, synthetic construct
  misc_feature 1..375: note = TAD1 homologous NA sequence
  source 1..375: mol_type = other DNA
gtgaaaaaattaagcactatacaaaaaagagaaaaattaaatgaagtatattcaactgatgaaataggtcctggaggagctaatcatgaatatgttattgaaagtaaatctattgatgatcaaggaaatccagatgtatatacaaaaataaaatttcaaaaaggtccaagaaacgaagaaaattctcaaaatggtataattgatacagatctattagaaatagtaagagatagattaaaagcatttcaagatggcccattcaactcagactataatgcttttgctttagttcatatagaagaagcattaatgtggcttaatagaagagttgaagatcgcatagaaagaaatgttcttggtaaaaacgaaaaataa

SEQ ID NO: 314 - DNA, 312 bp, synthetic construct
  misc_feature 1..312: note = TAD1 homologous NA sequence
  source 1..312: mol_type = other DNA
gtgattcacagcgaacactggaatgacaccaacgggaacccggccggcggcacgacgttcggccgcgggttcgccatcggctggcagaacggtccgctcggccgcggcgccgaacgcagcgaacccaacggcgcattcgtcgaagacatcatcgccgcggctgcggaccggctgcagtactaccaggactcgcgattcgccagcaagtacaacgccaccgccctgctgcacctggacgaggcactccgcgcactcaacgctcgcactgccgaccgcgaggaccgcgatgtggaaggcacgcacgcggaatag

SEQ ID NO: 315 - DNA, 381 bp, synthetic construct
  misc_feature 1..381: note = TAD1 homologous NA sequence
  source 1..381: mol_type = other DNA
gtggaaaaattaaacaccatacagaagcgaaataacctcaacgaggtgtaccgcaatgatgaacccggcgcaggcggagcctgtcacgtctacgtgatctgccaccgcgtattccctgtcggtgagaaagaaaggagcgtccctattgcagaaatcgtcttccaacacggaccccgaaatgaagaaggcagcgcgacaggcattctcgacgcagaccttctcgaaatcgtccgcgaccgcttgaaggctttccagactggcgaatacgccaccagggagaacgcctgcgcgattacgcacatagaagaagctctcatgtggatgaacaaacgagccgaggatagagccgagagaggcgtactcggcacgatgcagaagtaa

SEQ ID NO: 316 - DNA, 204 bp, synthetic construct
  misc_feature 1..204: note = TAD1 homologous NA sequence
  source 1..204: mol_type = other DNA
gttaaggaaaatgggttaaatggaatttttattgaagacttaatattaatttgtataaaccaattagaacattttcaagctagtaaatttaaatgtaaagaaaatgaatctacgctaaggcatttatatgatgcattagctacaactagatcaagacaatatgaaagacaattaagaaatgtacaaggtaaaaacttaaaataa

SEQ ID NO: 317 - DNA, 372 bp, synthetic construct
  misc_feature 1..372: note = TAD1 homologous NA sequence
  source 1..372: mol_type = other DNA
ttgaaaagagtagagcatgatttattaacgaataagtatacagaggtgtatcgcgaagaaaaatttaaatttaatgcacctcatcaattcgaggtaagggcaacgaatgggttcgaacaaagcggaaatcaagacgtattacaacgaatacatttccaagagggtccaatcaaagaaaatggcgtcaatggtgtttgtaacgaagatttaattgctatggttatttgccgacttgagcatttcaatcagactgaatttcgctgtcgcgaaaactcgatggctattaccaagttagaagaagctttgttatggttacgaaaacgaacaataggaagagaaaatagaggcgttgaaggaacacatattaaataa

SEQ ID NO: 318 - DNA, 399 bp, synthetic construct
  misc_feature 1..399: note = TAD1 homologous NA sequence
  source 1..399: mol_type = other DNA
ttggaaaattctacatttgtagctgtacgtaagttaagtacaattcagaaacgtgaaaaactcaatgacgtctatgcaatggacgaaccaggaaacggcggagctaatcatacttatgctgtatataagtctggtgaaacgcctaccattctcaatgagccgcttgtaatcattcagcttcagaatggagcaaggaaaattccggatagcattcatggcgtaattgatactgacctgctggaaattgttcgtgaccgacttaagtcatttcagaatggtgagtttgctacaagggaaaatgcttgtgctttgactcatatcgaagaggcacttatgtggttgaatcgtcgtgttgaggacagaatcgagagaaatgttctcggaacagataacaagtaa

SEQ ID NO: 319 - DNA, 399 bp, synthetic construct
  misc_feature 1..399: note = TAD1 homologous NA sequence
  source 1..399: mol_type = other DNA
ttggaaaattctacatttgtagctgtacgtaagttaagtacaattcagaaacgtgaaaaactcaatgacgtctatgcaatggacgaaccgggaaacggtggagctaatcatacttatgctgtatataagtctggtgaaacgcctaccattctcaatgagccgcttgtaatcatccagcttcagaatggagcgagaaagattccggatagcattcatggcgtaattgattctgacctgctggagattggtcgtgaccgacttaagtcattccagaatggtgagtttgctacaagggaaaacgcttgtgctttgactcatatcgaagaggcacttatgtggttgaatcgtcgtgttgaggacagaatcgagagaaatgttctcggaacagataacaagtaa

SEQ ID NO: 320 - DNA, 399 bp, synthetic construct
  misc_feature 1..399: note = TAD1 homologous NA sequence
  source 1..399: mol_type = other DNA
ttggaaaattctacatttgtagctgtacgtaagttaagtacaattcagaaacgtgaaaaactcaatgacgtctatgcaatggacgaaccgggaaatggtggagctaatcatacttatgctgtatataagtctggtgaaacgcctaccattctcaatgagccgcttgtaatcatccagcttcagaatggagcgagaaagattccggatagcattcatggcgtaattgattctgacctgctggagattgttcgtgaccgacttaagtcattccagaatggtgagtttgctacaagggaaaacgcttgtgctttgactcatatcgaagaggcacttatgtggttgaatcgtcgtgttgaggacagaatcgagagaaatgttctcggaacagataacaagtaa

SEQ ID NO: 321 - DNA, 327 bp, synthetic construct
  misc_feature 1..327: note = TAD1 homologous NA sequence
  source 1..327: mol_type = other DNA
ttggaaacattgcataccaaagttgttccaggagatatagaatttaattctcctacatcttataaaataattcataaagaaactggtaagattactcaaaatataaatatacaaaaaggacctgttaaggaaaatgggttaaatggaatttttattgaagacttaatattaatttgtataaaccaattagaacattttcaagctagtaaatttaaatgtaaagaaaatgaatctacgctaaggcatttatatgatgcattagctacaactagatcaagacaatatgaaagacaattaagaaatgtacaaggtaaaaacttaaaataa

SEQ ID NO: 322 - DNA, 315 bp, synthetic construct
  misc_feature 1..315: note = TAD1 homologous NA sequence
  source 1..315: mol_type = other DNA
ttggatgataagggtccaggtgaagccaatcatgtttatatgatatgtaaaaaagataaagatattttagacagtgtactagtagatataaattttcaaaaaggacctcgtaaagaaggaagttcaaccaatggtatactagatacagatttattagaaatagtaagacatagattacaaggttttcaagaaggtccttattcaagcagagaaaatgcatgtgcattaactcacattgaagaagcgctcatgtggttaaatagaagggttgaagataggatagaaagaaatgtattaggaactaaaaataaataa

SEQ ID NO: 323 - protein, 104 aa, synthetic construct
  REGION 1..104: note = TAD1 homologous AA sequence
LDDKGPGEANHVYMICKKDKDILDSVLVDINFQKGPRKEGSSTNGILDTDLLEIVRHRLQGFQEGPYSSRENACALTHIEEALMWLNRRVEDRIERNVLGTKNK

SEQ ID NO: 324 - protein, 108 aa, synthetic construct
  REGION 1..108: note = TAD1 homologous AA sequence
LETLHTKVVPGDIEFNSPTSYKIIHKETGKITQNINIQKGPVKENGLNGIFIEDLILICINQLEHFQASKFKCKENESTLRHLYDALATTRSRQYERQLRNVQGKNLK

SEQ ID NO: 325 - protein, 123 aa, synthetic construct
  REGION 1..123: note = TAD1 homologous AA sequence
LKRVEHDLLTNKYTEVYREEKFKFNAPHQFEVRATNGFEQSGNQDVLQRIHFQEGPIKENGVNGVCNEDLIAMVICRLEHFNQTEFRCRENSMAITKLEEALLWLRKRTIGRENRGVEGTHIK

SEQ ID NO: 326 - protein, 117 aa, synthetic construct
  REGION 1..117: note = TAD1 homologous AA sequence
MAFEIVKLGTDKYTEVLADAHKSYNCSPNFAVRTKTTGKILADIHFQDGPVKEKGLNGVANEDLIVMVMHRLNQLQGSEYACKETADAVKHLQEALDSLRARTNKREQRGVLGTSIK

SEQ ID NO: 327 - protein, 119 aa, synthetic construct
  REGION 1..119: note = TAD1 homologous AA sequence
MAKLSTIQKRNNLNTIYRSAEKGPGGGYHSYTVMDADGTKVVAQIEFQKGARNDPNARHGVLDADLLEIVRDRLTAFNKGEFATRENACAITHIEEAIMWMAKRADDRAERGVLGTYNK

SEQ ID NO: 328 - protein, 119 aa, synthetic construct
  REGION 1..119: note = TAD1 homologous AA sequence
MAKLSTIQKRNNLNTIYRSAEKGPGGGYHSYTVMDADGTKVVAQIEFQKGARNDPNARHGVLDADLLEIVRDRLTAFNKGEFATRENACAITHIEEALMWMAKRADDRAERGVLGTYNK

SEQ ID NO: 329 - protein, 118 aa, synthetic construct
  REGION 1..118: note = TAD1 homologous AA sequence
MDEVKLVNGLATSKYTEVYHERDYSFNAPHHFEVRSVEGDVLAEVNFQDGPIKEAGINGVMNEDLIAMVIARLNGFQNSDFRCRENAVAITKLEESLMWLRKRTADREARCVEGTHTV

SEQ ID NO: 330 - protein, 118 aa, synthetic construct
  REGION 1..118: note = TAD1 homologous AA sequence
MDGDKNTPQCSLDNLPRQESPERLALNLRLKAQEILDRCPRHVRLTLGNELLFQCGPVREFGVNGCQIEDVLTVLIDRLEAFQGGQYPSREGSIALMKMQEALMWLNRRTADRKERGV

SEQ ID NO: 331 - protein, 162 aa, synthetic construct
  REGION 1..162: note = TAD1 homologous AA sequence
MDKINFMNRKLYIEDLIIYALRGIDYIETKKGGELMRKLDTIQTKENLNDIYAIDNIGPGGANHQYMIVPNGTQVTEETLNYGYLNKIQMQCGPRNETNLENGLLPNDLLEIARDILKGFQSGDFANIYNEKALGHIEIALLYLNKRVEDRIKRQVLGKYEK

SEQ ID NO: 332 - protein, 126 aa, synthetic construct
  REGION 1..126: note = TAD1 homologous AA sequence
MEEVKMTKEMVKVEHDLLSERFTKVYREKESSFNAPHLFTVTTAEDDKTLGVIHFQEGAIQEHGVNGVMNEDLIHMVIERLQCFQASEFNCRENAMAITKLEEAMLWLRKRTMGRDKRGVLGTHVK

SEQ ID NO: 333 - protein, 126 aa, synthetic construct
  REGION 1..126: note = TAD1 homologous AA sequence
MEEVKMTKEMVKVEHDLLTERCTKVYREKESSFHAPHLFTVTSAEDDKTLAVIHFQEGALNVAGVNGVMNEDLLVMILTRLQSFQDSEFACKENAMAITKIEEALLWLRKRTMGREKRGVLGTHTK

SEQ ID NO: 334 - protein, 126 aa, synthetic construct
  REGION 1..126: note = TAD1 homologous AA sequence
MEEVKMTKEMVKVEHDLLTERVTKVYREKESSFHAPHLFTVTSAEDDKTLAVIHFQEGALNVAGVNGVMNEDLLVMILTRLQGFQNSEFACKENAMAITKIEEALLWLRKRTMGREKRGVLGTHTK

SEQ ID NO: 335 - protein, 126 aa, synthetic construct
  REGION 1..126: note = TAD1 homologous AA sequence
MEEVKMTKEMVKVEHDLLTERVTKVYREKESSFHAPHLFTVTSAEDDKTLAVIHFQEGALNVAGVNGVMNEDLLVMILTRLQGFQNSEFACKENEMAITKIEEALLWLRKRTMGREKRGVLGTHTK

SEQ ID NO: 336 - protein, 126 aa, synthetic construct
  REGION 1..126: note = TAD1 homologous AA sequence
MEEVKMTKEMVKVEHDLLTERVTKVYREKESSFKAPHLFTVTSAEDDKTLSVIHFQEGALNVAGVNGVMNEDLLVMILVRLQAFQDSEFACKENAMAITKIEEALLWLRKRTMGREKRGVLGTHAK

SEQ ID NO: 337 - protein, 122 aa, synthetic construct
  REGION 1..122: note = TAD1 homologous AA sequence
MEIKNGLCTQKYTKVYAEDKEKWKFNAPHHFIVGKADCEDEYIEPIEYVNFQEGPIKEYGINGVNNEDLILMVITRLQAFQDSPYKCRENAMAITKLQECLMWLGKRTLDREVKGIEGTSEI

SEQ ID NO: 338 - protein, 122 aa, synthetic construct
  REGION 1..122: note = TAD1 homologous AA sequence
MEIKNSLCTQNYTKLYCEDKEEWKYNAPCCFILGRAECEDDCIEPIQYLSFQEGPIKEQGVNGINNEDVILAVITRLEAFQDSPYACRENEKAIEKLEECLMWLRKRTLDRQMRSVEGTSGI

SEQ ID NO: 339 - protein, 122 aa, synthetic construct
  REGION 1..122: note = TAD1 homologous AA sequence
MEIKNSLCTQNYTKLYCEDKEEWKYNAPCYFILGRAECEDDCIEPIQYLSFQEGPIKEQGVNGINNEDVILAVITRLEAFQDSPYACKENEKAIEKLEECLMWLRKRTLDRQMRNVEGTSGI

SEQ ID NO: 340 - protein, 126 aa, synthetic construct
  REGION 1..126: note = TAD1 homologous AA sequence
MEKLNTIQKRNNLNEVYRNDEPGAGGACHVYVICHRVFPVGEKERSVPIAEIVFQHGPRNEEGSATGILDADLLEIVRDRLKAFQTGEYATRENACAITHIEEALMWMNKRAEDRAERGVLGTMQK

SEQ ID NO: 341 - protein, 119 aa, synthetic construct
  REGION 1..119: note = TAD1 homologous AA sequence
MEKLSTIQKCNNLNTIYRSTEKGPGGGYHSYTVMDADGTKVVAQIEFQKGARNDPNARHGILDADLLEIVRDRLTAFNKGEFSTRENACAITHIEEALMWMAKRADDRAERGVLGTYNK

SEQ ID NO: 342 - protein, 119 aa, synthetic construct
  REGION 1..119: note = TAD1 homologous AA sequence
MEKLSTIQKHNNPHAILRSDDEGPGGGYHDYTVMDVDRKSVIAQIKFQKGARNDPNARHGILDADLLEIVRDRLTAFNKGEFATRENACAITHIEEALMWMAKRADDRAERGVLGTYNK

SEQ ID NO: 343 - protein, 119 aa, synthetic construct
  REGION 1..119: note = TAD1 homologous AA sequence
MEKLSTIQKRNNLNTIYRSAEKGPGGGYHSYTVMDAGGTKVVAQIEFQKGARNDPNARRGVLDADLLEIVRDRLTAFNKGEFATRENACAITHIEEALMWMAKRADDRAERGVLGTYNK

SEQ ID NO: 344 - protein, 124 aa, synthetic construct
  REGION 1..124: note = TAD1 homologous AA sequence
MEKLSTIQKRNNLNTVYRVEDQGPGGGYHDYFIYPSDCDPETMELPLAVVEFQNGPRNDPNARHGVLDSDLLEIVRDRLKSFQEGSMATRENAIALQHVEEALLWMNKRVEDRAERNVLGTMKK

SEQ ID NO: 345 - protein, 125 aa, synthetic construct
  REGION 1..125: note = TAD1 homologous AA sequence
MELVKISNGLLTEKYTTVHHEKDYQFNAPHYFEVHDHSGNVLGSVHFQEGPIQEAGVNGVTNEDLIAMVIARLEGFQNSEFRNRDNAVAITKLEEALLWLRKRTLEREARGVEGTHTKRSGSLCT

SEQ ID NO: 346 - protein, 118 aa, synthetic construct
  REGION 1..118: note = TAD1 homologous AA sequence
MELVKLTNGLLTEKYTTVHHEKDYQFNAPHYFEVHDHGGNVLGSVHFQEGPIKEAGVNGVTNEDLIGMVLARLEGFQNSDYRCQDNAVAITKLEEALLWLRKRTLEREARGVEGTHTV

SEQ ID NO: 347 - protein, 118 aa, synthetic construct
  REGION 1..118: note = TAD1 homologous AA sequence
MELVKLTNGLLTEKYTTVHHEKDYQFNAPHYFEVHDLDEKVVGSVHFQEGPIKEAGVNGVANEDLINMVIRRLEGFQNSDYRCRENAVAITKLEESLMWLRKRTMDREARGVEGTHTV

SEQ ID NO: 348 - protein, 123 aa, synthetic construct
  REGION 1..123: note = TAD1 homologous AA sequence
MENIKQLTETIQREDNLNIVEYDDIPSHGNGRHNYIIRHKESGAILGEIHFQDGGRNTEGVRDGVLDQDLLEIVRHRLQCFQQGEFPSREGALAITHIEEALLWLNKRKEDRKYRGVLGKDLK

SEQ ID NO: 349 - protein, 123 aa, synthetic construct
  REGION 1..123: note = TAD1 homologous AA sequence
MENIKQLTETIQREDNLNIVEYDDTPSHGNGRHNYIIRHKESGAILGEIHFQDGGRNTEGVRDGVLDQDLLEIVRHRLQCFQQGEFPSREGALAITHIEEALLWLNKRKEDRKYRGVLGKDLK

SEQ ID NO: 350 - protein, 124 aa, synthetic construct
  REGION 1..124: note = TAD1 homologous AA sequence
MENKEKINFRIQRTDNLNDIYVDNVVGPGNGRHSYMIVKKDNPEEVLLEIQYQCGARKDENSVSGILDQDLLEIVRNRLQYFQKGEYATRENACALTHIEEALMWMAKRSNDRAERGVLGTMNK

SEQ ID NO: 351 - protein, 126 aa, synthetic construct
  REGION 1..126: note = TAD1 homologous AA sequence
MENRKLIRIQTENNLNEVYAVDEPGAGNASHEYRISPTGCDEQGNMYPSQDISFQNGPRKDPNSIPGVLDTDLLEIVRDRLKGFQSGEFACRENACALTHIEEALMWMNKRVTDRAQRGVLGTNNK

SEQ ID NO: 352 - protein, 132 aa, synthetic construct
  REGION 1..132: note = TAD1 homologous AA sequence
MENSTFVAVRKLSTIQKREKLNDVYAMDEPGNGGANHTYAVYKSGETPTILNEPLVIIQLQNGARKIPDSIHGVIDSDLLEIGRDRLKSFQNGEFATRENACALTHIEEALMWLNRRVEDRIERNVLGTDNK

SEQ ID NO: 353 - protein, 132 aa, synthetic construct
  REGION 1..132: note = TAD1 homologous AA sequence
MENSTFVAVRKLSTIQKREKLNDVYAMDEPGNGGANHTYAVYKSGETPTILNEPLVIIQLQNGARKIPDSIHGVIDSDLLEIVRDRLKSFQNGEFATRENACALTHIEEALMWLNRRVEDRIERNVLGTDNK

SEQ ID NO: 354 - protein, 132 aa, synthetic construct
  REGION 1..132: note = TAD1 homologous AA sequence
MENSTFVAVRKLSTIQKREKLNDVYAMDEPGNGGANHTYAVYKSGETPTILNEPLVIIQLQNGARKIPDSIHGVIDTDLLEIVRDRLKSFQNGEFATRENACALTHIEEALMWLNRRVEDRIERNVLGTDNK

SEQ ID NO: 355 - protein, 130 aa, synthetic construct
  REGION 1..130: note = TAD1 homologous AA sequence
MERLNTIQKREKLNEVFAVDEKGPGGANHEYGIYRDEIICSNSITTEHEMNLISKIQFQKGARNEVRSQQGVIDTDLLEIVRDRLHCFQQGEFASEYNYQALIHIEEALMWLNRRVEDRIERNVLGTYNK

SEQ ID NO: 356 - protein, 109 aa, synthetic construct
  REGION 1..109: note = TAD1 homologous AA sequence
METIKYNALEELHNELNRGTPGDEVSLNIGGKEVLKIKFQTGDTATTERNGVFIEDLLIIAYAKLAGYNRELPCRENSVALTKIEEAIMWLANRKVEREVRGVYGTEEK

SEQ ID NO: 357 - protein, 109 aa, synthetic construct
  REGION 1..109: note = TAD1 homologous AA sequence
METIKYNALEELHNELNRGTPGDEVSLNIGGKEVLKIKFQTGGTAATERNGVFIEDLLIITYAKLAGYNRELPCRENSVALTKIEEAIMWLANRKAEREARGVYGTEEK

SEQ ID NO: 358 - protein, 108 aa, synthetic construct
  REGION 1..108: note = TAD1 homologous AA sequence
METLHTKIIPGDIEFNSPTSYKIIHKKTDKITQNINIQKGPVKENGLNGIFIEDLILICINQLEHFQNSEFKCKDNEATLRHLQDALATTRARQYERQLRNVQGKNLK

SEQ ID NO: 359 - protein, 109 aa, synthetic construct
  REGION 1..109: note = TAD1 homologous AA sequence
METTKYNALEELHNELNRGTPGDEVSLNIAGKEVLKIKFQTGGTATTERNGVFIEDLLIVAYSKLADYNRGLPCRENSLALTKIEEAIMWLANRKVERESRGVYGTEEK

SEQ ID NO: 360 - protein, 109 aa, synthetic construct
  REGION 1..109: note = TAD1 homologous AA sequence
METTKYNALEELHNELNRGTPGDEVSLNIGGKEVLKIKFQTGGTAATERNGVFIEDLLIIAYAKLAGYNRELPCRENSVALTKIEEAIMWLANRKAEREARGVYGTEEK

SEQ ID NO: 361 - protein, 109 aa, synthetic construct
  REGION 1..109: note = TAD1 homologous AA sequence
METTKYNALEELHNELNRGTPGDEVSLNIGGKEVLKIKFQTGGTAATERNGVFIEDLLIVAYAKLAGYNRELPCRENSVALTKIEEAIMWLANRKAEREARGVYGTEEK

SEQ ID NO: 362 - protein, 109 aa, synthetic construct
  REGION 1..109: note = TAD1 homologous AA sequence
METTKYNALEELHNELNRGTPGDEVSLNIGGKEVLKIKFQTGGTATTERNGVFIEDLLIVAYAKLAGYNRELPCRENSVALTKIEEAIMWLANRKAEREARGVYGTEEK

SEQ ID NO: 363 - protein, 109 aa, synthetic construct
  REGION 1..109: note = TAD1 homologous AA sequence
METTKYNALEELHNELNRGTPGDEVSLNIGGKEVLKIKFQTGGTATTERNGVFIEDLLIVAYAKLAGYNRELPCRENSVALTKIEEAIMWLANRKAEREARGVYGTEKR

SEQ ID NO: 364 - protein, 109 aa, synthetic construct
  REGION 1..109: note = TAD1 homologous AA sequence
METTKYNALEELHNELNRGTPGDEVSLNIGGKEVLKIKFQTGGTATTERNGVFIEDLLIVAYAKLAGYNRELPCRENSVALTKIEEAIMWLANRKTEREARGVYGTEEK

SEQ ID NO: 365 - protein, 109 aa, synthetic construct
  REGION 1..109: note = TAD1 homologous AA sequence
METTKYNALEELHNELNRGTPGDEVSLNIGGKEVLKIKFQTGGTATTERNGVFIEDLLIVAYAKLAGYNRELPCRENSVALTKIEEAIMWLANRKVEREARGVYGTEEK

SEQ ID NO: 366 - protein, 109 aa, synthetic construct
  REGION 1..109: note = TAD1 homologous AA sequence
METTKYNALEELHNELNRGTPGDEVSLNIGGKEVLKIKFQTGGTATTERNGVFIEDLLIVAYAKLASYNRELPCRENSVALTKIEEAIMWLANRKAEREARGVYGTEEK

SEQ ID NO: 367 - protein, 109 aa, synthetic construct
  REGION 1..109: note = TAD1 homologous AA sequence
METTKYNALEELHNELNRGTPGDEVSLNIGGKEVLRIKFQTGGTATTERNGVFIEDLLIVAYAKLAGYNRELPCRENSVALTKIEEAIMWLANRKAEREARGVYGTEEK

SEQ ID NO: 368 - protein, 109 aa, synthetic construct
  REGION 1..109: note = TAD1 homologous AA sequence
METTKYNALEELHNELNRGTPGDEVSLNIGGKEVLRIKFQTGGTATTERNGVFIEDLLIVAYAKLAGYNRELPCRENSVALTKIEEAIMWLANRKAEREARGVYGTEKR

SEQ ID NO: 369 - protein, 109 aa, synthetic construct
  REGION 1..109: note = TAD1 homologous AA sequence
METTKYNALEELHNELNRGTPGDEVSLNIGGKEVLRVKFQTGGTAATERNGVFIEDLLIITYAKLAGYNRELPCRENSVALTKIEEAIMWLANRKAEREARGVYGTEEK

SEQ ID NO: 370 - protein, 109 aa, synthetic construct
  REGION 1..109: note = TAD1 homologous AA sequence
METTKYNALEELHNELNRGTPGDEVSLNIGGKEVLRVKFQTGGTATTEKSGVFIEDLLIVAYAKLNEYNKYLPSRENSLALTKIEEAIMWLANRKAEREARGVYGTEEK

SEQ ID NO: 371 - protein, 109 aa, synthetic construct
  REGION 1..109: note = TAD1 homologous AA sequence
METTKYNALEELHNELNRGTPGDEVSLNIGGKEVLRVKFQTGGTATTERNGVFIEDLLIVAYAKLAGYNRELPCRENSVALTKIEEAIMWLANRKVEREVRGVYGTEEK

SEQ ID NO: 372 - protein, 119 aa, synthetic construct
  REGION 1..119: note = TAD1 homologous AA sequence
METVKLENELLTEKYTYIMHEAEPEYNAPHHFTVHNAKTGEVLNEIHFQCGPIKEKGVNGVNNEDLLNMVAARLRGFQASEFCCRENAMALTKIEEALMWLRKRTIARVRRGVEGTHTV

SEQ ID NO: 373 - protein, 121 aa, synthetic construct
  REGION 1..121: note = TAD1 homologous AA sequence
MGEKITTVQYKGNLNEVYRVADKGVGNAYNEYVIRTKDDDPVELARIKFQKGARNEPISEVGVIDSDLLEIVRDRLKLFQEGEFECTENAMALVHIETAIMWLNRRVEDRIKRDVIGTHKK

SEQ ID NO: 374 - protein, 121 aa, synthetic construct
  REGION 1..121: note = TAD1 homologous AA sequence
MGERITTVQYKGNLNEVYRVADKGVGNAYNEYVIRTKDDEPVELARIKFQKGARNEPVSEVGVIDSDLLEIVRDRLKLFQEGEFECTENAMALVHIETAIMWLNRRVEDRIKRDVIGTHKK

SEQ ID NO: 375 - protein, 120 aa, synthetic construct
  REGION 1..120: note = TAD1 homologous AA sequence
MIEISRIFGETDRLYIKTLDEPMEINGGVNHHFAICNKENDEVIQEIKFQKGPIKENGVNGIQNVDLINIVIDNLEHFQKGQFACEYNQLALEHLRHALSWLNQRTKDRKARGVEGENKQ

SEQ ID NO: 376 - protein, 123 aa, synthetic construct
  REGION 1..123: note = TAD1 homologous AA sequence
MIMEIKNGLCTQKYTVYTEDKEKWKFNAPHHFIVGKADCEEKYIEPIEYVNFQEGPIKEFGINGVNNEDLILMVITRLQAFQDSPYKCRENDMAITKLEECLMWLRKRTLDRGVKGIEGTSEI

SEQ ID NO: 377 - protein, 84 aa, synthetic construct
  REGION 1..84: note = TAD1 homologous AA sequence
MIQSIKLKLKQQKIKTIKRGKIKCVSLIRFRLEIVRDRLQGFQSGEFACRENAIALTHLEECLLWMNKRVEDRAERGVLGTSNK

SEQ ID NO: 378 - protein, 131 aa, synthetic construct
  REGION 1..131: note = TAD1 homologous AA sequence
MIQYTEIKDNNSKMELESDLLIKNYTKITCENSKDWKFNAPHHFEVSSVEKEEVLGKVNFQEGPIKENGVNGVSNEDLINMIIARLEAFQRTDYNCPENAMAITKLEESLMWLRKRTNSRSKRGVEGTSTI

SEQ ID NO: 379 - protein, 223 aa, synthetic construct
  REGION 1..223: note = TAD1 homologous AA sequence
MKATKKPVTIECFKYDGDLKNGNGEYYVPEWAVEAEKNGTIFFKDQGEMYIKTLEGDRHASVGDYIIRGVNGKLCPCKPDIFEKTYDIVDSGNRVREFKETKHNLLTTKYTKVLEESEYQYNAPHTFRVIKAQEETSEEHKGENLVLSEIHFQEGPIKECGVNGVCNEDLLVMVIRRLQGFQESKYKCRENAMAITKIEAALLWLRKRTMACENRGVEGTHMV

SEQ ID NO: 380 - protein, 125 aa, synthetic construct
  REGION 1..125: note = TAD1 homologous AA sequence
MKELATIQKREKLNEVWTIDEKGPGGAHHNYIIVSNEVNFKNQQPLFATEIQFQKGARKEESSTHGVIDTDLLEIVRDRLKSFQSGQYSSRENACALTHIEEALMWLNRRVEDRIERDVLGTNNK

SEQ ID NO: 381 - protein, 101 aa, synthetic construct
  REGION 1..101: note = TAD1 homologous AA sequence
MKELKMDLLTSKYTKVMQEEEFSYNAPHRFSVVKADSGEPLADIHFQEGPIQECGVNGVCNEDLINMVICRLEHFQQSEHRCRENALAITSLEEALLWLRK

SEQ ID NO: 382 - protein, 117 aa, synthetic construct
  REGION 1..117: note = TAD1 homologous AA sequence
MKELKMDLLTSKYTKVMQEEEFSYNAPHRFSVVKADSGEPLADIHFQEGPIQECGVNGVCNEDLINMVICRLEHFQQSEHRCRENALAITSLEEALLWLRKRTIARENRGVEGTHNV

SEQ ID NO: 383 - protein, 117 aa, synthetic construct
  REGION 1..117: note = TAD1 homologous AA sequence
MKELKRDLLRAKFTRVMVEEDYKYNAPHNFEVRRVEDDALVCKIHFQEGPVHECGINGVNNEDLINMVVERLECFQRSPYACRENQIAITKLEEALLWLRKRTEGRVQRGVEGTSKL

SEQ ID NO: 384 - protein, 117 aa, synthetic construct
  REGION 1..117: note = TAD1 homologous AA sequence
MKELKRDLLRAKFTRVMVEEDYKYNAPHNFEVRRVEDDALVRKIHFQEGPVHECGSNGVANEDLINMVVERLECFQRSPYACRENQIAITKLEEALLWLRKRTEGRVQRGIEGTSKL

SEQ ID NO: 385 - protein, 117 aa, synthetic construct
  REGION 1..117: note = TAD1 homologous AA sequence
MKELKRDLLRAKFTRVMVEENYKYNAPHNFEVRRVEDDALVCKIHFQEGPVHECGSNGVGNEDLINMVVERLECFQRSPYACRENEIAITKLEEALLWLRKRTEGRVQRGIEGTSKL

SEQ ID NO: 386 - protein, 117 aa, synthetic construct
  REGION 1..117: note = TAD1 homologous AA sequence
MKELKRDLLRTKFTRVMVEENYKYNAPHNFEVRRVEDDALVCKIHFQEGPVHECGSNGVGNEDLINMVVERLECFQRSPYACRENEIAITKLEEALLWLRKRTEGRVQRGVEGTSKL

SEQ ID NO: 387 - protein, 117 aa, synthetic construct
  REGION 1..117: note = TAD1 homologous AA sequence
MKELKRDLLRTKFTRVMVEGNYKYNAPHNFEVRRVEDDALVCKIHFQEGPVHECGSNGVGNEDLINMVVERLECFQRSPYACRENEIAITKLEEALLWLRKRTEGRVQRGVEGTSKL

SEQ ID NO: 388 - protein, 117 aa, synthetic construct
  REGION 1..117: note = TAD1 homologous AA sequence
MKELKRDLLRTKYTKVMVEEEYKYNAPHNFEVRRVEDDAIVCSIHFQEGPVLECGSNGVGNEDLINMVVERLECFQKSEFACRENAIAITKLEEALLWLRKRTEARVQRGVEGTHTV

SEQ ID NO: 389 - protein, 122 aa, synthetic construct
  REGION 1..122: note = TAD1 homologous AA sequence
MKELNTIQKKEKLNEVYVLDNKGPGGANHVYMICKKDKDILDSVLVDINFQKGPRKEGSSTNGIANEDLLEIVRHSLQSFQAGPFSSRENACALTHIEEALMWLNRRVEDRIERNVLGTNNK

SEQ ID NO: 390 - protein, 128 aa, synthetic construct
  REGION 1..128: note = TAD1 homologous AA sequence
MKELNTIQKREKLNDVYSIDTKGNGGANHEYLVCQHGKTSWCNGNNSELVYAEIQFQNGPRNESNSIHGVANEDLLEIVRDRLKSFQAGPFSSRENACALTHIEEALMWMNRRAEDRIERNVLGKNEK

SEQ ID NO: 391 - protein, 122 aa, synthetic construct
  REGION 1..122: note = TAD1 homologous AA sequence
MKELNTIQKREKLNDVYVLDEKGNGGAHHIYMICKHNKDITDNVLVDINFQNGPRNEESLTYGILDTDLLEIVRHRLQCFQAGPYSSRENACALTHIEEALIWLNRRVENRIYRNVLGTNNK

SEQ ID NO: 392 - protein, 122 aa, synthetic construct
  REGION 1..122: note = TAD1 homologous AA sequence
MKELNTIQKREKLNEVYALDDKGPGGANHVYMICKKGEEILDSVLVDIQFQKGPRKEVSASNGVLDTDLLEIVRHRLQCFQAGPYSSRENACALTHIEEALMWLNRRVEDRIERNVLGTNNK

SEQ ID NO: 393 - protein, 122 aa, synthetic construct
  REGION 1..122: note = TAD1 homologous AA sequence
MKELNTIQKREKLNEVYVLDDKGLGGVNHVYMICKKDKDILDSVLVDINFQKGPRKEGSSTNGILDTDLLEIVRHRLQGFQEGPYSSRENACALTHIEEALMWLNRRVEDRIERNVLGTNNK

SEQ ID NO: 394 - protein, 121 aa, synthetic construct
  REGION 1..121: note = TAD1 homologous AA sequence
MKELNTIQKREKLNRVFACDEAGPGGASHEYGIMSDKGLQVPKEQVITFQKGPRNVEGSQHGATNEDLLEIVRDRLKSFQAGPFSSRENACALTHIEEALMWMNRRVEDRIERNVLGRNEK

SEQ ID NO: 395 - protein, 128 aa, synthetic construct
  REGION 1..128: note = TAD1 homologous AA sequence
MKELSTIQKREKLNDVYSIDTKGNGGANHEYLICQHGKTSWCNGNNSELVYAEIQFQNGPRNESNSILGVTNEDLLEIVRDRLKSFQAGPFSSRENACALTHIEEALMWINRRVEDRIERNVLGRNEK

SEQ ID NO: 396 - protein, 128 aa, synthetic construct
  REGION 1..128: note = TAD1 homologous AA sequence
MKELSTIQKREKLNDVYSIDTKGNGGANHEYLICQHGKTSWCNGNNSELVYAEIQFQNGPRNESNSILGVTNEDLLEIVRDRLKSFQAGPFSSRENACALTHVEEALMWMNRRVEDRIERNVLGRNEK

SEQ ID NO: 397 - protein, 128 aa, synthetic construct
  REGION 1..128: note = TAD1 homologous AA sequence
MKELSTIQKREKLNDVYSIDTKGNGGANHEYLICQHGNTSWCNGNNSELVYAEIQFQNGPRNESNSIHGVTNEDLLEIVRDRLKAFQAGPFSSKENACALTHIEEALMWMNRRVEDRIERNVLGRNEK

SEQ ID NO: 398 - protein, 126 aa, synthetic construct
  REGION 1..126: note = TAD1 homologous AA sequence
MKELSTIQKREKLNQVFAADGEGPGGAHHEYRIQYELFPVGKSKETHIISKIQFQKGPRKEKDSTHGVIDTDLLEIVRDRLKSFQAGPFASRENACALTHIEEALMWMNRRVEDRIERNVLGKNEK

SEQ ID NO: 399 - protein, 121 aa, synthetic construct
  REGION 1..121: note = TAD1 homologous AA sequence
MKELSTIQKREKLNRVFACDEAGPGGASHEYGIMSDKGLQVPKEQVITFQKGPRNVEGSQHGACDEDLLEMVRDRLKAFQRGPYSCRENACALTHIEEALLWLNMRKEDRIERNVLGKNEK

SEQ ID NO: 400 - protein, 124 aa, synthetic construct
  REGION 1..124: note = TAD1 homologous AA sequence
MKELSTIQKREKLNTVERIGSEGPGGAYHEYVIKSNSMDSQGNYDVYETIKFQKGARKEEKSQHGVIDSDLLEIVRDRLKSFQAGPFSSRENACALTHVEEALMWMNRRVEDRIERNVLGTNTK

SEQ ID NO: 401 - protein, 124 aa, synthetic construct
  REGION 1..124: note = TAD1 homologous AA sequence
MKELSTIQKREKLNTVERIGSEGPGGAYHEYVIKSNSMDTQGNYDVYEIIKFQKGPRNEDGSIHAVIDTDLLEIVRDRLKSFQAGPFSSRENACALTHIEEALMWMNRRVEDRIERSVFGRNEK

SEQ ID NO: 402 - protein, 124 aa, synthetic construct
  REGION 1..124: note = TAD1 homologous AA sequence
MKELSTIQKREKLNTVMCVDNEGPGGAHHKYLIQSKERDLNGTPLFLGEIQLQCGPRKDENSIHGVIDTDLLEIVRDRLKAFQRGPYSCRENACALTHIEEALLWLNMRKEDRIERNVLGKNEK

SEQ ID NO: 403 - protein, 119 aa, synthetic construct
  REGION 1..119: note = TAD1 homologous AA sequence
MKELSTIQKREKLNTVNIKGEVGPGGAYHKYNIISNDNGILLGSVQFQMGPRNETNSIAGVIDSDLLEIVRDRLQCFQTGPFSSRENAIALTHIEEALMWMNRRVEDRIERNVLGRNEK

SEQ ID NO: 404 - protein, 104 aa, synthetic construct
  REGION 1..104: note = TAD1 homologous AA sequence
MKILTEGHRYELANFEKKDAPGQVIQFIEKVPESPGSATLVTVNDGTTNEELARVLINRIQHLNGKFPCRENAIAITHFETGLMWLEKRTADRVARNVEGKATT

SEQ ID NO: 405 - protein, 114 aa, synthetic construct
  REGION 1..114: note = TAD1 homologous AA sequence
MKKISENGLNSVFVKDEIKFNGHHEYEIRRNDNNELLLKIQYQEGARKEHNSIPGILDLDLLYIVRDRIQTFQKGEFACRENALVLTKVEEAIMWSEARVRDREKRKVLRTYNK

SEQ ID NO: 406 - protein, 118 aa, synthetic construct
  REGION 1..118: note = TAD1 homologous AA sequence
MKKLEYDLLTSKYTEVHHEEGFNFNAPNYFEVRDSQEQLNILAKINFQSGPIKKYGVNGVNNEDLISMVICRLAHFQKSEFACRENEKAIEKLEEALLWLRKRTMGREARGVEGTHQK

SEQ ID NO: 407 - protein, 127 aa, synthetic construct
  REGION 1..127: note = TAD1 homologous AA sequence
MKKLITIQKREKLNDVYAIDEVGPGGANHRYAIVPKGEEEVRLITTYQPMSEIQLQCGARKEENSIHGVIDADLLEIVRHRLQCFQAGPFASEYNSKALEHIEIALMYMNRRVEDRIERNVLGTYNK

SEQ ID NO: 408 - protein, 133 aa, synthetic construct
  REGION 1..133: note = TAD1 homologous AA sequence
MKKLSTIQKREKLNDVFAVDEEGPGGANHLYVIYKNGSAVLEDGDASLRGKPEDLLLTVQMQCGPRKEADSLHGVIDTDLLEIVRDRLKAFQAGPFSSRENACALTHIEEALMWLNRRVEDRIERDVLGKNQK

SEQ ID NO: 409 - protein, 133 aa, synthetic construct
  REGION 1..133: note = TAD1 homologous AA sequence
MKKLSTIQKREKLNDVFAVDEEGPGGANHLYVIYKNGSAVLEDGDTSLRGKPEDLLLTVQMQCGPRKEADSLHGVIDTDLLEIVRDRLKAFQAGPFSSRENACALTHIEEALMWLNRRVEDRIERDVLGKNQK

SEQ ID NO: 410 - protein, 133 aa, synthetic construct
  REGION 1..133: note = TAD1 homologous AA sequence
MKKLSTIQKREKLNDVFAVDEIGPGGANHLYCVYKAGTATLEDDDTLLRAEPENLLLTLQMQCGPRKEKDSLHGVIDTDLLEIVRDRLKAFQAGPFSSRENACALTHIEEALMWMNRRVEDRIERNVLGKNEK

SEQ ID NO: 411 - protein, 133 aa, synthetic construct
  REGION 1..133: note = TAD1 homologous AA sequence
MKKLSTIQKREKLNDVFAVDEIGPGGANHLYCVYKAGTATLEDDDTSLRAEPENLLLTLQMQCGPRKEKDSLHGVIDTDLLEIVRDRLKAFQAGPFSSRENACALTHIEEALMWMNRRTEDRIERNVLGKNEK

SEQ ID NO: 412 - protein, 133 aa, synthetic construct
  REGION 1..133: note = TAD1 homologous AA sequence
MKKLSTIQKREKLNDVFAVDEIGPGGANHLYCVYKAGTATLEDDDTSLRAEPENLLLTLQMQCGPRKEKDSLHGVIDTDLLEIVRDRLKAFQAGPFSSRENACALTHIEEALMWMNRRVEDRIERNVLGKNEK

SEQ ID NO: 413 - protein, 133 aa, synthetic construct
  REGION 1..133: note = TAD1 homologous AA sequence
MKKLSTIQKREKLNDVFAVDEIGPGGANHLYCVYKAGTATLEDDDTSLRAEPENLLLTLQMQCGPRKETDSLHGVIDTDLLEIVRDRLKSFQAGPFASKENACALTHIEEALMWMNRRVEDRIERNVLGKNEA

SEQ ID NO: 414 - protein, 133 aa, synthetic construct
  REGION 1..133: note = TAD1 homologous AA sequence
MKKLSTIQKREKLNDVFAVDEIGPGGANHLYCVYKAGTATLEDDNTSLRAEPENLLLTLQMQCGPRKEKDSLHGVIDTDLLEIVRDRLKAFQAGPFSSRENACALTHIEEALMWMNRRTEDRIERNVLGKNEK

SEQ ID NO: 415 - protein, 133 aa, synthetic construct
  REGION 1..133: note = TAD1 homologous AA sequence
MKKLSTIQKREKLNDVFAVDEIGSGGANHLYLVYKAGSATLEDNDTSLRGKPEDLLLTLQMQCGPRKEENSLHGVIDTDLLEIVRDRLKAFQAGPFASRENACALTHIEEALMWMNRRVEDRIERNVLGKNEK

SEQ ID NO: 416 - protein, 133 aa, synthetic construct
  REGION 1..133: note = TAD1 homologous AA sequence
MKKLSTIQKREKLNDVFAVDEIGSGGANHLYLVYKAGSATLEDNDTSLRGKPEDLLLTLQMQCGPRKEKDSLHGVIDTDLLEIVRDRLKAFQAGPFASRENACALTHIEEALMWMNRRVEDRIERNVLGKNEK

SEQ ID NO: 417 - protein, 133 aa, synthetic construct
  REGION 1..133: note = TAD1 homologous AA sequence
MKKLSTIQKREKLNDVFAVDENGPGGANHLYCVYKVGTATLEDDDTSLIAEPENLLLTLQMQCGPRKEKDSLHGVIDTDLLEIVRDRLKAFQAGPFSSRENACALTHIEEALMWMNRRTEDRIERNVLGKNEK

SEQ ID NO: 418 - protein, 133 aa, synthetic construct
  REGION 1..133: note = TAD1 homologous AA sequence
MKKLSTIQKREKLNDVFAVDKIGPGGANHLYCVYKAGTATLEDDDTSLRAEPDNLLLTLQMQCGPRKEKNSLHGVIDTDLLEIVRDRLKAFQAGPFASRENACALTHIEEALMWMNRGVEDRIERNVLGKNEK

SEQ ID NO: 419 - protein, 124 aa, synthetic construct
  REGION 1..124: note = TAD1 homologous AA sequence
MKKLSTIQKREKLNEVYSTDEIGPGGANHEYVIESKSIDDQGNPDVYTKIKFQKGPRNEENSQNGIIDTDLLEIVRDRLKAFQDGPFNSDYNAFALVHIEEALMWLNRRVEDRIERNVLGKNEK

SEQ ID NO: 420 - protein, 119 aa, synthetic construct
  REGION 1..119: note = TAD1 homologous AA sequence
MKKLSVIQKNNNPHTIYRNGDQGPGGGYHDYTVMDAEGNAVIALVRFQKGSRNDPKAQAGVLDADLLEIVRDRLTAFNRGEFATRENACAITHIEEALMWMAKRADDRAERGVLGTYNK

SEQ ID NO: 421 - protein, 119 aa, synthetic construct
  REGION 1..119: note = TAD1 homologous AA sequence
MKKLSVIQKNNNPHTIYRNGDQGPGGGYHDYTVMDAEGSAVIALVRFQKGSRNDPKSQAGVLDADLLEIVRDRLTAFNKGEFATRENACAITHIEEALMWMAKRADDRAERGVLGTYNK

SEQ ID NO: 422 - protein, 127 aa, synthetic construct
  REGION 1..127: note = TAD1 homologous AA sequence
MKLSTIQKREKLNDVYAMDEKGVGGVNHRYVICKNGSQEWQQGSNSDNVYADIQLQNGARKEDDSIHGVIDTDLLEIVRHRLQCFQAGPFSSRENACALTHIEEALMWMNRRVEDRIERNVLGRNEK

SEQ ID NO: 423 - protein, 133 aa, synthetic construct
  REGION 1..133: note = TAD1 homologous AA sequence
MKQLNTIQKLEKLNDVFAIDEVGPGGAYHLYQICKHNTARIVEEDGTFRTRPENMIATIQMQCGARKDPDAISGAIDSDLLEIVRDRLTAFQSGPYPSHETEQALLHVEEALLWLNKRVEDRAERGVLGTETK

SEQ ID NO: 424 - protein, 133 aa, synthetic construct
  REGION 1..133: note = TAD1 homologous AA sequence
MKQLNTIQKMEKLNDVFAIDEVGPGGAHHLYQVCKLNTGRISDEDNSFRTRPENMLATIQMQCGARKDPDAISGVIDSDLLEIVRDRLSAFQQGPYPSYETAQALYHVEEALMWLNRRVEDRATRGVLGTETK

SEQ ID NO: 425 - protein, 133 aa, synthetic construct
  REGION 1..133: note = TAD1 homologous AA sequence
MKQLNTIQKMEKLNDVFAIDEVGPGGAHHLYQVCKLNTGRISDEDNTFRTRPENMLATIQMQCGARKDPDAISGVIDSDLLEIVRDRLSAFQQGPYPSYETAQALYHVEEALMWLNRRVEDRATRGVLGTETK

SEQ ID NO: 426 - protein, 133 aa, synthetic construct
  REGION 1..133: note = TAD1 homologous AA sequence
MKQLNTIQKMEKLNDVFAIDEVGPGGAHHLYQVCKLNTGRISDEDNTFRTRPENMLATIQMQCGARKDPDAISGVIDSDLLEIVRDRLSAFQQGPYPSYETAQALYHVEGALMWLNRRVEDRATRGVLGTETK

SEQ ID NO: 427 - protein, 133 aa, synthetic construct
  REGION 1..133: note = TAD1 homologous AA sequence
MKQLNTIQKMEKLNDVFAIDEVGPGGAHHLYQVCKLNTGRISDEDNTFRTRPENMLATIQMQCGARKDPDAVSGVIDSDLLEIVRDRLSAFQQGPYPSYETAQALYHVEGALMWLNRRVEDRATRGVLGTETK

SEQ ID NO: 428 - protein, 133 aa, synthetic construct
  REGION 1..133: note = TAD1 homologous AA sequence
MKQLNTIQKMEKLNDVFAIDEVGPGGAHHLYQVCKLNTGRISDEDNTSRTRPENMLATIQMQCGARKDPDAVSGVIDSDLLEIVRDRLSAFQQGPYPSYETAQALYHVEGALMWLNRRVEDRATRGVLGTETK

SEQ ID NO: 429 - protein, 133 aa, synthetic construct
  REGION 1..133: note = TAD1 homologous AA sequence
MKQLNTIQKMEKLNDVFAIDEVGPGGAHHLYQVCKLNTGRISGEDNTFRTRPENMLATIQMQCGARKDPDAISGVIDSDLLEIVRDRLSAFQQGPYPSYETAQALYHVEGALMWLNRRVEDRATRGVLGTETK

SEQ ID NO: 430 - protein, 128 aa, synthetic construct
  REGION 1..128: note = TAD1 homologous AA sequence
MKQLNTIQKMEKLNDVYAVDEKGNGGANHRYVICKQGETRWCNGNNSEGVYSDIQFQNGARKEENSIHGVANEDLLEIVRHRLQCFQAGPFASKYNEEALKHIEEALHCMNARVEDRVKRNVLGRNEK

SEQ ID NO: 431 - protein, 133 aa, synthetic construct
  REGION 1..133: note = TAD1 homologous AA sequence
MKQLPTIQKREKLNDVFAVDEIGPGGANHLYCVYKAGTATLEDDDTSLRAEPENLLLTLQMQCGPRKEKDSLHGVIDTDLLEIVRDRLKAFQAGPFSSRENACALTHIEEALMWMNRRVEDRIERNVLGKNEK

SEQ ID NO: 432 - protein, 133 aa, synthetic construct
  REGION 1..133: note = TAD1 homologous AA sequence
MKQLSTIQKREKLNDVFAVDEIGPGGANHLYCVCKAGTATLEDDDTSLRAEPDNLLLTLQMQCGPRKEKDSLHGVIDTDLLEIVRDRLKAFQAGPFASRENACALTHIEEALMWMNRRVEDRIERNVLGKNEK

SEQ ID NO: 433 - protein, 133 aa, synthetic construct
  REGION 1..133: note = TAD1 homologous AA sequence
MKQLSTIQKREKLNDVFAVDEIGPGGANHLYCVYKAGTATLEDDDTSLRAEPDNLLLTLQMQCGPRKEKDSLHGVIDTDLLEIVRDRLKAFQAGPFSSRENACALTHIEEALMWMNRRVEDRIERNVLGKNEK

SEQ ID NO: 434 - protein, 133 aa, synthetic construct
  REGION 1..133: note = TAD1 homologous AA sequence
MKQLSTIQKREKLNDVFAVDEIGPGGANHLYCVYKAGTATLEDDDTSLRAEPENLLLTLQMQCGPRKEKASLHGVIDTDLLEIVRDRLKAFQAGPFSSRENACALTHIEEALMWMNRRVEDRIERNVLGKNEK

SEQ ID NO: 435 - protein, 133 aa, synthetic construct
  REGION 1..133: note = TAD1 homologous AA sequence
MKQLSTIQKREKLNDVFAVDEIGPGGANHLYCVYKAGTATLEDDDTSLRAEPENLLLTLQMQCGPRKEKDSLHGVIDTDLLEIVRDRLKAFQAGPFSSRENACALTHIEEALMWMNRRTEDRIERNVLGKNEK

SEQ ID NO: 436 - protein, 133 aa, synthetic construct
  REGION 1..133: note = TAD1 homologous AA sequence
MKQLSTIQKREKLNDVFAVDEIGPGGANHLYCVYKAGTATLEDDDTSLRAEPENLLLTLQMQCGPRKEKDSLHGVIDTDLLEIVRDRLKAFQAGPFSSRENACALTHIEEALMWMNRRVEDRIERNVLGKNEK

SEQ ID NO: 437 - protein, 133 aa, synthetic construct
  REGION 1..133: note = TAD1 homologous AA sequence
MKQLSTIQKREKLNDVFAVDEIGPGGANHLYCVYKAGTATLKDDDTSLRAEPDNLLLTLQMQCGPRKEKDSLHGVIDTDLLEIVRDRLKAFQAGPFSSRENACALTHIEEALMWMNRRVEDRIERNVLGKNEK

SEQ ID NO: 438 - protein, 132 aa, synthetic construct
  REGION 1..132: note = TAD1 homologous AA sequence
MKRLEHDLLTRKYTEVFHEEEFTNNAPHHFEVYANTGIVMYNPNNVENDNPLPLKVGEVNFQEGPIQEAGINGVMNEDLIAMVICRLEHFNQTDFRCRENSMAITKLEEALLWLRKRTVGREKRGVEGTHTK

SEQ ID NO: 439 - protein, 132 aa, synthetic construct
  REGION 1..132: note = TAD1 homologous AA sequence
MKRLEHDLLTSKYTKVFHEEEFTNNAPHHFEVYANTGIVMYNPNNVENDNPLPLKVGEVDFQEGPIKEAGINGVMNEDLIAMVICRLEHFNQTDFRCKENSMAITKLEEALLWLRKRTVGREKRGVEGTHTK

SEQ ID NO: 440 - protein, 109 aa, synthetic construct
  REGION 1..109: note = TAD1 homologous AA sequence
MKTLKYNALEKLHNELNRGAPGDEVSLNIGGKEVLKIKFQTGGTATTERNGVFIEDLLIVTYAKLADYNRGLPCRENSLALTKIEEAIMWLANRKVERESRGVYGTEEK

SEQ ID NO: 441 - protein, 102 aa, synthetic construct
  REGION 1..102: note = TAD1 homologous AA sequence
MKTLTQGHKYELKGFENAKITQTIQFIEKAPIGDTTELETINDGTTNEEVLEMLIDRMNYLQGRFPCEENAIVITNLQESLMWLEKRTSDRKKRNVEGSNKA

SEQ ID NO: 442 - protein, 109 aa, synthetic construct
  REGION 1..109: note = TAD1 homologous AA sequence
MKTTKYNALEELHNELNRGTPGDEVSLNIAGKEVLKIKFQTGGTATTERNGVFIEDLLIVAYSKLADYNRGLPCRENSLALTKIEEAIMWLANRKVERESRGVYGTEEK

SEQ ID NO: 443 - protein, 109 aa, synthetic construct
  REGION 1..109: note = TAD1 homologous AA sequence
MKTTKYNALEELHNELNRGTPGDEVSLNVAGKEVLKIKFQTGGTATTERNGVFIEDLLIVAYSKLADYNRGLPCRENSLALTKIEEAIMWLANRKVERESRGVYGTEEK

SEQ ID NO: 444 - protein, 139 aa, synthetic construct
  REGION 1..139: note = TAD1 homologous AA sequence
MKVEYFDKDFDSENYPFERLSGQKISTIQKRNNLNVVLRRGDSGPGGAYHEYVIIGTNGFAITNIRFQKGPRNAPSSETGALDVDLLEIVRDRLSCFQKGDMPTRESAIALTHVEEALLWLNKRTEDRAERNVLGTMEK

SEQ ID NO: 445 - protein, 123 aa, synthetic construct
  REGION 1..123: note = TAD1 homologous AA sequence
MLADYKAENWTDPDKNPTGGAVHGVGLEIKWQEGPGGAVHGVGLEIKWQEGPLGRGTERKEPNGAFVETVIDACRQRIQFYQDSKFKCRENAIAITKLEEALMWLNKRTTDREKRQVEGEHKI

SEQ ID NO: 446 - protein, 542 aa, synthetic construct
  REGION 1..542: note = TAD1 homologous AA sequence
MLKYFLKLKYINTFISLQFKLKRSEIMKEYLLQNVDENGIVRSEKLFKDSSPSGEMIGTRNFTILLGEDEINYNAPHTYIILNKEDFENEKHSVEYIDNSKNEIRKIDAITSNAVMGMVKFQKGPFKEVGLNGIFHEDLLAIVINRLEHFQASEFSCEENAKAIEYLKLAIEALSSRTKRRDNAGVLGTNNVDVSSEGNVVKALEKVNSKYYLFYNPDTKKIYSFLTYFKDNDGNNAYLVIEAVGNSNDKIIILNKDYEIGFFNKYDLVETNFPVSGDYIIFREEDILSTKAEIKFDINEIPMEKVEKEKSKGYNYLYNKSSGKIYAYISDDYDDNIILKLIGNDSERITIKDKDYETQYFNSYELSNTNYPIQGTYWVFTDEDIVSEKNVEIKEEVKSDWKGFNGDQKLEKKTLELDKDTKVDKVPFIPIVSYNLTSTTEMVSEKSDSTAEEPSVKVAQISDYFTLKDKIYKELVPYNEGDKTIRLVQIAGPGFEPETLEVKVRAFDIEYLGHDDTDNERPFIGYYVKLTESDIIYNESEE

SEQ ID NO: 447 - protein, 110 aa, synthetic construct
  REGION 1..110: note = TAD1 homologous AA sequence
MMETTKYNALEELHNELNRGTPGDEVSLNIGGKEVLRIKFQTGGTATTERNGVFIEDLLIVAYAKLAGYNRELPCRENSVALTKIEEAIMWLANRKAEREARGVYGTEEK

SEQ ID NO: 448 - protein, 120 aa, synthetic construct
  REGION 1..120: note = TAD1 homologous AA sequence
MMYSPLMRLDLGGAHHLYQVCKLNTGRISDEDNTFRTRPENMLATIQMQCGARKDPDAISGVIDSDLLEIVRDRLSAFQQGPYPSYETAQALYHVEGALMWLNRRVEDRATRGVLGTETK

SEQ ID NO: 449 - protein, 139 aa, synthetic construct
  REGION 1..139: note = TAD1 homologous AA sequence
MNCPKCSGVRISTERRPNGNHVCGSCGHAWPNQAGKEPMRPEGQRAYPFLSGEYKPYIYINDESVTFVGQGGPIKEVGVNGCQIDDIIEFAKDVITVFNQRFPCRENSMIITKLDEALLWSMKRKLDRDKRGVEGTSNK

SEQ ID NO: 450 - protein, 129 aa, synthetic construct
  REGION 1..129: note = TAD1 homologous AA sequence
MNKEPGTEKQFTEVEHELLGGVYTKVFHETEFTSHAPHYFKVERTEGEGNNVVGAVHFQEGTVKEAGVNGVFNEDLIAMILTRLQFFQNTKFACRENAMAITKLEEALMWLNKRTTDRRNRGVEGTYKK

SEQ ID NO: 451 - protein, 129 aa, synthetic construct
  REGION 1..129: note = TAD1 homologous AA sequence
MNKEPGTEKQFTEVEHELLGGVYTKVFHETEFTSHAPHYFKVERTEGEGNNVVGGVHFQEGTVKEAGVNGVFNEDLIAMILTRLQFFQGTQFACRENAMAITKLEEALMWLNKRTTDRRNRGVEGTYKK

SEQ ID NO: 452 - protein, 106 aa, synthetic construct
  REGION 1..106: note = TAD1 homologous AA sequence
MNKLNYNALNELHNTLRCGVPADEYSQGINDKEVLKIIFESSEGKRDGVSIEDLLTVAYAKLASYNRELPCRENSVALTKIEEAIMWLANRKAEREARGVYGTEEK

SEQ ID NO: 453 - protein, 109 aa, synthetic construct
  REGION 1..109: note = TAD1 homologous AA sequence
MNKPSYNALEELHNELNRGTPGDEVSLNIGGKEVLKIKFQTGGTATTERNGVFIEDLLIIAYAKLAGYNRELPCRENSVALTKIEEAIMWLANRKAEREARGVYGTEEK

SEQ ID NO: 454 - protein, 109 aa, synthetic construct
  REGION 1..109: note = TAD1 homologous AA sequence
MNKPSYNALEELHNELNRGTPGDEVSLNIGGKEVLKIKFQTGGTATTERNGVFIEDLLIIAYAKLAGYNRGLPCRENSVALTKIEEAIMWLANRKAEREARGVYGTEEK

SEQ ID NO: 455 - protein, 106 aa, synthetic construct
  REGION 1..106: note = TAD1 homologous AA sequence
MNKSNYNALNELHNTLRCGVPADEYSQGINDEEVLRIKFASREGKRDGVSIEDLLTVAYAKLASYNRELPCRENSVALTKIEEAIMWLANRKAEREARGVYGTEEK

SEQ ID NO: 456 - protein, 106 aa, synthetic construct
  REGION 1..106: note = TAD1 homologous AA sequence
MNKSNYNALNELHNTLRCGVPADEYSQGINDEEVLRIKFASSEGKRDGVSIEDLLTVAYAKLASYNRELPCRENSIALTKIEEAIMWLANRKAEREARGVYGTEEK

SEQ ID NO: 457 - protein, 106 aa, synthetic construct
  REGION 1..106: note = TAD1 homologous AA sequence
MNKSNYNALNELHNTLRCGVPADEYSQGINDEEVLRIKFASSEGKRDGVSIEDLLTVAYAKLASYNRELPCRENSVALTKIEEAIMWLANRKAEREARGVYGTEEK

SEQ ID NO: 458 - protein, 106 aa, synthetic construct
  REGION 1..106: note = TAD1 homologous AA sequence
MNKSNYNALNELHNTLRCGVPADEYSQGINDKEVLKIIFESSEGKRDGVSIEDLLTVAYAKLASYNRELPCRENSVALTKIEEAIMWLANRKAEREARGVYGTEEK

SEQ ID NO: 459 - protein, 120 aa, synthetic construct
  REGION 1..120: note = TAD1 homologous AA sequence
MNLPTNEVSGELIHKDNNGVCVEHMIAPDYPDGHWYQIFHSEKFTVDITFQNGPIKEHGVNGLTSEALLSILIHRTKILNDRFPCDENKRAITYMENALALFEQRTKDRLSRGVEGQNKI

SEQ ID NO: 460 - protein, 137 aa, synthetic construct
  REGION 1..137: note = TAD1 homologous AA sequence
MNNSEHETQGHASESIVFGTDIHEDHNGVVVTHNEQIQVENSEKRHELSHGHYYDILSGELVTPIQFQHGPVKEHGVNGITSEALLAILIHRTKILNNNFPCEENKRAITYMENALALFEQRTRDRQQRGVEGLNQA

SEQ ID NO: 461 - protein, 156 aa, synthetic construct
  REGION 1..156: note = TAD1 homologous AA sequence
MNRKLCIEDLIIYALRGIDYAETKKGGELMRKLDTIQTKENLNDIYAIDNIGPGGANHQYMIVPNGTQVTEETLNYGYLNKIQMQCGPRNETNLANGLLPNDLLEIARDVLKGFQSSDFANIYNEKALGHIEIALLYLNKRVEDRIKRQVLGKYEK

SEQ ID NO: 462 - protein, 156 aa, synthetic construct
  REGION 1..156: note = TAD1 homologous AA sequence
MNRKLCIEDLIIYVLRGIDYIETKKGGELMRKLDTIQTKENLNDIYAIDNIGPGGANHQYMIVPNGTQVTEETLNYGYLNKIQMQCGPRNETNLANGLLPNDLLEIARDILKGFQSGDFANIYNEKALGHIEIALLYLNKRVEDRIKRQVLGKYEK

SEQ ID NO: 463 - protein, 79 aa, synthetic construct
  REGION 1..79: note = TAD1 homologous AA sequence
MNRNSNHYINIKFQAGAIDHEGVNGCQVEDVISVLVEKLKSHQNGEFACAENSIAISNLETANYALRVRKERLENKERT

SEQ ID NO: 464 - protein, 119 aa, synthetic construct
  REGION 1..119: note = TAD1 homologous AA sequence
MQKIFEQAYAGTVNRVFVVDEPGPGNGCHQYRTEIEADGAEFCTETNFQKGPVKEVGLNGIQNEHLLAMVIHRLQGFQSGPYSCRENAQALASLQKAMQWMEARTKDRAQRGVEGVNQK

SEQ ID NO: 465 - protein, 119 aa, synthetic construct
  REGION 1..119: note = TAD1 homologous AA sequence
MQKIFEQAYAGTVNRVFVVDEPGQGNGCHQYRTEIEADGAEFYTETNFQKGPVQEVGLNGIQNEHLLAMVIHRLQGFQSGPYACNENAQALASLQKAMQWMEARTKDRSARKVEGLNQK

SEQ ID NO: 466 - protein, 152 aa, synthetic construct
  REGION 1..152: note = TAD1 homologous AA sequence
MQQAQDNVLVGIAEPINDQGENLLIDHFLGCANRELEPHEIDKVVNGEMVEGITAYKQGHYYKISSNNEKQNATDFEISIHFQDGPISEHGINGATSEALLQILIHRTKTLDENFPSEFNKQAIAYMESALEEFNKRTSERRARGVEGTLVK

SEQ ID NO: 467 - protein, 152 aa, synthetic construct
  REGION 1..152: note = TAD1 homologous AA sequence
MQQAQDNVLVGIAEPINDQGENLLIDHFLGYANRELKPQEIDKVVNGEMVEGITAYAQGHYYKISANPETQNAKDFEISLHFQDGPIPEHGVNGVTSEALLKVLIHRTKTLDEKFPSEFNKQAIIYMESALEEFNKRTAERRARGVEGTLLK

SEQ ID NO: 468 - protein, 152 aa, synthetic construct
  REGION 1..152: note = TAD1 homologous AA sequence
MQQAQDNVLVGIAEPINDQGENLLIDHFLGYASHELEPQEIDKVIKGEVVEGITEYAQGHYYKISANPENQNAKEFEISIHFQDGPIPEHGVNGVTSEALLKVLIHRTKTLDEKFPSEFNKQAIIYMESALEEFNKRTAERRARGVEGTLVK

SEQ ID NO: 469 - protein, 152 aa, synthetic construct
  REGION 1..152: note = TAD1 homologous AA sequence
MQQAQDNVLVGIAEPINGEGENLLIDHFLGYASHELEPQEIDKVIKGEVVEGITEYAQGHYYKISANPENQNAKDFEISIHFQDGPIPEHGVNGVTSEALLKVLIHRTKTLDEKFPSEFNKQAIIYMESALEEFNKRTAERRARGVEGTLVK

SEQ ID NO: 470 - protein, 152 aa, synthetic construct
  REGION 1..152: note = TAD1 homologous AA sequence
MQQAQDNVLVGIAEPINGQGENLLIDHFLGYASHELEPQEIDKVIKGEVVEGITEYAQGHYYKISANPENQNAKDFEISIHFQDGPIPEHGVNGVTREALLKVLIHRTKTLDEKFPSEFNKQAIIYMESALEEFNKRTAERRARGVEGTLVK

SEQ ID NO: 471 - protein, 152 aa, synthetic construct
  REGION 1..152: note = TAD1 homologous AA sequence
MQQAQDNVLVGIAEPINGQGENLLIDHFLGYASHELEPQEIDKVIKGEVVEGITEYAQGHYYKISANPENQNAKDFEISIHFQDGPIPEHGVNGVTSEALLKVLIHRTKTLDEKFPSEFNKQAIICMESALEEFNKRTAERRARGVEGTLVK

SEQ ID NO: 472 - protein, 152 aa, synthetic construct
  REGION 1..152: note = TAD1 homologous AA sequence
MQQAQDNVLVGIAEPINGQGENLLIDHFLGYASHELEPQEIDKVIKGEVVEGITEYAQGHYYKISANPENQNAKDFEISIHFQDGPIPEHGVNGVTSEALLKVLIHRTKTLDEKFPSEFNKQAIIYMESALDEFNKRTAERRARGVEGTLVK

SEQ ID NO: 473 - protein, 152 aa, synthetic construct
  REGION 1..152: note = TAD1 homologous AA sequence
MQQAQDNVLVGIAEPINGQGENLLIDHFLGYASHELEPQEIDKVIKGEVVEGITEYAQGHYYKISANPENQNAKDFEISIHFQDGPIPEHGVNGVTSEALLKVLIHRTKTLDEKFPSEFNKQAIIYMESALEEFNKRTAERRARGVEGTLVK

SEQ ID NO: 474 - protein, 152 aa, synthetic construct; identical to SEQ ID NO: 473
  REGION 1..152: note = TAD1 homologous AA sequence

SEQ ID NO: 475 - protein, 152 aa, synthetic construct
  REGION 1..152: note = TAD1 homologous AA sequence
MQQAQDNVLVGIAEPINGQGENLLIDHFLGYASHELEPQEIDKVIKGEVVEGITEYAQGHYYKISANPENQNAKDFEISIHFQDGPIPEHGVNGVTSEALLKVLIHRTKTLDEKFPSEFNKQAISYMESALEEFNKRTAERRARGVEGTLVK

SEQ ID NO: 476 - protein, 152 aa, synthetic construct
  REGION 1..152: note = TAD1 homologous AA sequence
MQQAQDNVLVGIAEPINGQGENLLIDHFLGYASHELEPQEIDKVIKGEVVEGITEYAQGHYYKISANPENQNAKDFEISIHFQDGPIPGHGVNGVTSEALLKVLIHRTKTLDEKFPSEFNKQAIIYMESALEEFNKRTAERRARGVEGTLVK

SEQ ID NO: 477 - protein, 152 aa, synthetic construct
  REGION 1..152: note = TAD1 homologous AA sequence
MQQAQDNVLVGIAEPINGQGENLLIDHFLGYASHELEPQEIDKVIKGEVVEGITEYAQGHYYKISANPENQNAKEFEISIHFQDGPIPEHGVNGVTSEALLKVLIHRTKTLDEKFPSEFNKQAIIYMESALEEFNKRTAERRARGVEGTLLK

SEQ ID NO: 478 - protein, 152 aa, synthetic construct
  REGION 1..152: note = TAD1 homologous AA sequence
MQQAQENVLVGIAEPINGQGENLLIDHFLGYANQELEPQKIDKVVNGEVVEGITAYAQGHYYKISANPETPNAKDFEISLHFQDGPIHEHGVNGVTSEALLKVLIHRTKTLDEKFPSEFNKQAIVHMESALKEFNKRTEERRARGVADTLVK

SEQ ID NO: 479 - protein, 152 aa, synthetic construct
  REGION 1..152: note = TAD1 homologous AA sequence
MQQAQENVLVGIAEPINGQGENLLIDHFLGYANQELEPQKIDKVVNGEVVEGITAYAQGHYYKISANPETQNAKDFEISLHFQDGPIHEHGVNGVTSEALLKVLIHRTKTLDEKFPSEFNKQAIIYMESALEEFNKRTAERRARGVEDTLAK

SEQ ID NO: 480 - protein, 117 aa, synthetic construct
  REGION 1..117: note = TAD1 homologous AA sequence
MQQRIIAENFTDKEGNPQGGYAVGAGIDIRWQNGPLGRGESRIEPNGALVEGVIQAAILRLQYYETTKFKCWQNAGAIAYLQDALGMLIAYLQDALGMLEVRTADREERGVEGTHVV

SEQ ID NO: 481 - protein, 108 aa, synthetic construct
  REGION 1..108: note = TAD1 homologous AA sequence
MQTLHTKIISGEINFNSPSSYKVIHKTTGEVAQTINIQKGPVKENGLNGIFIEDLLLICIDQLEHFQASQFKCKENEATLRHLNDALATTRARQYERYLRDVQGKNLK

SEQ ID NO: 482 - protein, 103 aa, synthetic construct
  REGION 1..103: note = TAD1 homologous AA sequence
MQVLVPGHRYVAHNFEDKNGHGQTIQFIHKEPKGDTTELETVSDGTTNEELLAVLIDRMVFLQNAFPCRENAIVITKLEESLMWLNKRTSDRLKRNVEGKQIA

SEQ ID NO: 483 - protein, 118 aa, synthetic construct
  REGION 1..118: note = TAD1 homologous AA sequence
MREIKGHIINPTNDTLSLVAMDEKGQGNSNHHYQVTHGNSTLVDVRFQNGPINEHGVNGLTNEVLLEIVADRLRGFQDGEYRCKENACALTHIEEAQHWLQQRTIERMRRGVEGTHKK

SEQ ID NO: 484 - protein, 139 aa, synthetic construct
  REGION 1..139: note = TAD1 homologous AA sequence
MREITTHRVNPANDRLVIEVLDEPGSGGANHLYEVSGFDYATNASAGPHHVEGSALVVLFQNGPIAEAGVNGVTQEVLLAIVIDRLRSFQRGPYACRENALALTKIEEAQHWLLARTRDRMAKGVEGTHAKREDEGAAA

SEQ ID NO: 485 - protein, 134 aa, synthetic construct
  REGION 1..134: note = TAD1 homologous AA sequence
MRELNGHKVNGCNDHLTITVLDEPGKGGAPHLYQVEGFNSGTNPSDPWTARHGQPAQHSTILFQNGPIPEVGTNGLTHEVLLTILIDRLEGFQNGPFAHPYNADALSSLRSARASLQQRTKDRLARGVEGTHQV

SEQ ID NO: 486 - protein, 127 aa, synthetic construct
  REGION 1..127: note = TAD1 homologous AA sequence
MRELNTIQKRENLNDIYAIDEKGAGGANHEYMIVEHNTNITEEIINYSYLNKIRFQSGPRQEKNSQHGLIDTDLLEIVRDRMKAFQAGPFASKYNEKALEHIELALMYLNRRVEDRIERDVLGKYEK

SEQ ID NO: 487 - protein, 127 aa, synthetic construct
  REGION 1..127: note = TAD1 homologous AA sequence
MRELSTIQKREKLNDVYAVDEIGPGGANHQYVIVPHNVDVTDEIMEYGYLVKIKLQCGPRKDENSQHGVIDTDLLEIVRDRMKAFQAGPFASEYNEKALEHIELALMYLNRRVEDRIERNVLGTNNK

SEQ ID NO: 488 - protein, 122 aa, synthetic construct
  REGION 1..122: note = TAD1 homologous AA sequence
MRELSTIQKRENLNNVYAADEKSSGGANHEYVIDGVDPNGAYVSYQRIHFQKGPRKEEDAIHGVLDSDLLEIVRDRLKSFQAGPFASRENACALTHIEEALMWMNRRVEDRIERNVLGTYQK

SEQ ID NO: 489 - protein, 121 aa, synthetic construct
  REGION 1..121: note = TAD1 homologous AA sequence
MRELSTIQKRENLNRVFAVDEQGPGGANHEYLIVSDTGLMQPKEQRIGFQKGPRKEDDSIQGVIDSDLLEIVRDRLKSFQAGPFSSRENACALTHIEEALMWMNRRVEDRIEREVLGTMQK

SEQ ID NO: 490 - protein, 116 aa, synthetic construct
  REGION 1..116: note = TAD1 homologous AA sequence
MRELSTIQKRNNLNEVYAADETGPGNANHVYFIKCDDEPVVIAFQKGPRMDPESTRGVLDVDLLEIVRDRLKGFQSGDFSCRENACALTHIEEALMWMNRRVEDRAERNVLGTYDK

SEQ ID NO: 491 - protein, 121 aa, synthetic construct
  REGION 1..121: note = TAD1 homologous AA sequence
MRGLSTIQKRENLNRVFAVDEQGPGGANHEYLIVSDTGLMQPKEQRIGFQKGPRKEDDSIQGVIDSDLLEIVRDRLKSFQAGPFSSRENACALTHIEEALMWMNRRVEDRIEREVLGTMQK

SEQ ID NO: 492 - protein, 112 aa, synthetic construct
  REGION 1..112: note = TAD1 homologous AA sequence
MRIFTDHNGVAVNAIAKTSDGQAVEGHLYQVLAGTSQQDIRFQLGPVQQAGVNGATNEALIAVLVHRLQHLNRLCPCRENSLAITKLEEAAHWLEARTRDRQARQVEGTSAA

SEQ ID NO: 493 - protein, 129 aa, synthetic construct
  REGION 1..129: note = TAD1 homologous AA sequence
MRIIDDHKVNPANDQLEIQVIDEPGAGGAHHAYLVRGFNSLSNPSTGGVELKSTMILFQNGPIPEAGVNGLTHEVLLAIVADRLRSFQAGPYACKANACALTHIEEAQHWLQQRTLERMRRGVEGTHQK

SEQ ID NO: 494 - protein, 124 aa, synthetic construct
  REGION 1..124: note = TAD1 homologous AA sequence
MRKINTIQKREKLNDIYAVDDKSHDGANHQYLVVKEGRKTYDLNAILCEIPFQKGSRQDSNSKNGVTSSDLLEIVRDILIGYQKGPYSCRENACALTHIEEALMWLNKRVNDRIDKNILGKYEK

SEQ ID NO: 495 - protein, 124 aa, synthetic construct
  REGION 1..124: note = TAD1 homologous AA sequence
MRKINTIQKREKLNDVYAVDDKSHDGANHQYLIVKEGRKTYDLNAILCEIPFQKGSRQDSNSKNGVTSSDLLEIVRDILIGYQKGPYSCRENACALTHIEEALMWLNKRVNDRIDKNILGKYEK

SEQ ID NO: 496 - protein, 121 aa, synthetic construct
  REGION 1..121: note = TAD1 homologous AA sequence
MRKLDTIQKRNNLNTVYAVDEPGIGNANHAYQVVVTNNEGHEIPYAITFQNGPRKEKDSIHGLLDTDLLEIVRDRLKGFQSGDYPCRENALALTALEEALLWMQKRVDDRASRGVLGTNNK

SEQ ID NO: 497 - protein, 122 aa, synthetic construct
  REGION 1..122: note = TAD1 homologous AA sequence
MRKLETIQKREKLNDVFAVDEIGPGGANHEYHITLNNGKDTASDVAIIQMQKGPRKNVDSIHGVIDSDLLEIVRDRLKAFQAGPFASEYNEQALKHIEQALTWMNKRVEDRVKRNVLGTYNK

SEQ ID NO: 498 - protein, 124 aa, synthetic construct
  REGION 1..124: note = TAD1 homologous AA sequence
MRKLETIQKVSKLNDVYAVGEKGPGNANHQYIITKKDVDVTELGGVVGEISFQKGPRNLEDSQHGVLDVDLLEICRDRLKGFQSGDFVCEENQKALEHIEIALMYLNKRTEDRHFRNVLGKYEK

SEQ ID NO: 499 - protein, 121 aa, synthetic construct
  REGION 1..121: note = TAD1 homologous AA sequence
MRKLNTIQKKNNLNTVYAVDEKGIGNANHVYNVIVTDGQGNETPYSIAFQNGPRKEMNSIHGLLDTDLLEIVRDRLQGFQSGEFACRENAIALTHLEECLLWMNKRVEDRAERGVLGTSNK

SEQ ID NO: 500 - protein, 121 aa, synthetic construct
  REGION 1..121: note = TAD1 homologous AA sequence
MRKLNTIQKNNNLNTVYAVDEKGVGNANHVYNVIVTDGQGNETPYSIAFQNGPRKETDSIHGLLDTDLLEIVRDRLQGFQSGEFACRENALALTHLEECLLWMNLRVENRAERGVLGTSNK

SEQ ID NO: 501 - protein, 128 aa, synthetic construct
  REGION 1..128: note = TAD1 homologous AA sequence
MRKLNTIQKREKLNDVYAVDEIGPGGANHRYIICEEGETCWCDGSNIIGVVADIFLQRGPRKDKNSQHGVIDTDLLEIVRDRMKAFQAGPFASEYNEKALEHIELALMYLNRRVEDRIERNVLGTYEK

SEQ ID NO: 502 - protein, 127 aa, synthetic construct
  REGION 1..127: note = TAD1 homologous AA sequence
MRKLNTIQKRENLNDIYAIDENGAGGANHEYMIVEHNTNITEEIINYSYLNKIRFQSGPRQEKNSQHGLIDTDLLEIVRDRMKAFQAGPFASKYNEKALEHIELALMYLNRRVEDRIERDVLGKYEK

SEQ ID NO: 503 - protein, 121 aa, synthetic construct
  REGION 1..121: note = TAD1 homologous AA sequence
MRKLNTIQKRNNLNTVYAIDEKGIGNANHVYNVIVTDGQGNETPYSIAFQNGPRKEMDSIHGLLDTDLLEIVRDRLQGFQSGEFACRENAIALTHLEECLLWMNFRVENRAERGVLGTSNK

SEQ ID NO: 504 - protein, 121 aa, synthetic construct
  REGION 1..121: note = TAD1 homologous AA sequence
MRKLNTIQKRNNLNTVYAVDEKGIGNANHVYNIVVTDGQGNETPYSIAFQNGPRKEMDSIHGLLDTDLLEIVRDRLQGFQSGEFACRENAIALTHLEECLLWMNKRVEDRAERGVLGTSNK

SEQ ID NO: 505 - protein, 121 aa, synthetic construct
  REGION 1..121: note = TAD1 homologous AA sequence
MRKLNTIQKRNNLNTVYAVDEKGIGNANHVYNVIVTDGQGNETPYSIAFQNGPRKEMDSIHGLLDTDLLEIVRDRLQGFQSGEFACRENAIALTHLEECLLWMSKRVEDRAERGVLGTSNK

SEQ ID NO: 506 - protein, 121 aa, synthetic construct
  REGION 1..121: note = TAD1 homologous AA sequence
MRKLNTIQKRNNLNTVYAVDEKGIGNANHVYNVIVTDGQGNETPYSIAFQNGPRKEMNSIHGLLDTDLLEIVRDRIQGFQSGEFACRENAIALTHLEECLLWMNLRVENRAERGVLGTSNK

SEQ ID NO: 507 - protein, 121 aa, synthetic construct
  REGION 1..121: note = TAD1 homologous AA sequence
MRKLNTIQKRNNLNTVYAVDEKGIGNANHVYNVIVTDGQGNETPYSIAFQNGPRKEMNSIHGLLDTDLLEIVRDRLQGFQSGEFACRENAIALTHLEECLLWMNFRVENRAERGVLGTSNK

SEQ ID NO: 508 - protein, 121 aa, synthetic construct
  REGION 1..121: note = TAD1 homologous AA sequence
MRKLNTIQKRNNLNTVYAVDEKGIGNANHVYNVIVTDGQGNETPYSIAFQNGPRKEMNSIHGLLDTDLLEIVRDRLQGFQSGEFACRENAIALTHLEECLLWMNLRVENRAERGVLGTSNK

SEQ ID NO: 509 - protein, 121 aa, synthetic construct
  REGION 1..121: note = TAD1 homologous AA sequence
MRKLNTIQKRNNLNTVYAVDEKGIGNANHVYNVIVTDGQGNETPYSIAFQNGPRKETDSIHGLLDTDLLEIVRDRLQGFQSGEFACRENALALTHLEECLLWMHKRVEDRAERGVLGTTNK

SEQ ID NO: 510 - protein, 121 aa, synthetic construct
  REGION 1..121: note = TAD1 homologous AA sequence
MRKLNTIQKRNNLNTVYAVDEKGIGNANHVYNVIVTDGQGNETPYSITFQNGPRKEMNSIHGLLDTDLLEIVRDRLQGFQSGEFACRENAIALTHLEECLLWMNKRVEDRAERGVLGTNNK

SEQ ID NO: 511 - protein, 121 aa, synthetic construct
  REGION 1..121: note = TAD1 homologous AA sequence
MRKLNTIQKRNNLNTVYAVDEKGIGNANHVYNVVVTDGQGNETPYSIAFQNGPRKEMDSIHGLLDTDLLEIVRDRLQGFQSGEFACRENAIALTHLEECLLWMDKRVEDRAERGVLGTSNK

SEQ ID NO: 512 - protein, 121 aa, synthetic construct
  REGION 1..121: note = TAD1 homologous AA sequence
MRKLNTIQKRNNLNTVYAVDEKGVGNANHVYNVIVTDGQGNETPYSIAFQNGPRKEMNSIHGLLDTDLLEIVRDRLQGFQSGEFACRENAIALTHLEECLLWMNKRVEDRAERGVLGTSNK

SEQ ID NO: 513 - protein, 121 aa, synthetic construct
  REGION 1..121: note = TAD1 homologous AA sequence
MRKLNTIQKRNNLNTVYAVDEKGVGNANHVYNVVVTDGQGNETPYSIAFQNGPRKEMDSIHGLLDTDLLEIVRDRLQGFQSGEFACRENAIALTHLEECLLWMNLRVENRAERGVLGTNNK

SEQ ID NO: 514 - protein, 122 aa, synthetic construct
  REGION 1..122: note = TAD1 homologous AA sequence
MRKLQTIQKKNNLNKVFAVDEKGNGGANHQYWIAASKYDGDEPSIFEVQFQNGARFEDGSKDGVLDCDLLEIVRDRLLGFQEGEYANGYNEAALYHVEKALKWLNERVEDRDRRGVLGTNNK

SEQ ID NO: 515 - protein, 133 aa, synthetic construct
  REGION 1..133: note = TAD1 homologous AA sequence
MRKLSTIQKKEKLNEVFAVDEQGPGGANHLYMVCKAEEARLDDDASSISVDPNAVMCTIQLQCGPRKEDKSTHGVIDSDLLEIVRDRLKSFQAGPYASRENACALTHIEEALMWMNRRVEDRIERQVLGTYNK

SEQ ID NO: 516 - protein, 127 aa, synthetic construct
  REGION 1..127: note = TAD1 homologous AA sequence
MRKLSTIQKKEKLNSIYAVDEKGPGGAYHKYAIVPCCEDEVMLVITYEPMCEIQLQCGPRKEENSIHGVIDTDLLEIVRDRLKAFQAGPFSSDYNEKALEHIEEALMWMNRRVEDRIERNVLGKNIK

SEQ ID NO: 517 - protein, 128 aa, synthetic construct
  REGION 1..128: note = TAD1 homologous AA sequence
MRKLSTIQKREKLNDVYAADEIGPGGANHRYIICKEGETCWCDGSNFIGVVAEILLQRGPRKDKNSQHGVIDTDLLEIVRDRMKAFQAGPFASEYNEKALEHIELALMYLNRRVEDRIERNVLGTYNK

SEQ ID NO: 518 - protein, 128 aa, synthetic construct
  REGION 1..128: note = TAD1 homologous AA sequence
MRKLSTIQKREKLNDVYAADEIGPGGANHRYIICKEGETCWCDGSNFIGVVAEILLQRGPRKDKNSQHGVIDTDLLEIVRDRMKAFQAGPFASEYNEKALEHIEWALMYLNRRVEDRIERNVLGKNEK

SEQ ID NO: 519 - protein, 128 aa, synthetic construct
  REGION 1..128: note = TAD1 homologous AA sequence
MRKLSTIQKREKLNDVYAADEIGQGGANHRYIICKEGETCWCDGSNFIGVVAEILLQHGVRKDKNSQHGVIDSDLLEIVRDRMKAFQAGQFASEYNEKALEHIELALMYLNRRVEDRIERNVLGKNEK

SEQ ID NO: 520 - protein, 128 aa, synthetic construct
  REGION 1..128: note = TAD1 homologous AA sequence
MRKLSTIQKREKLNDVYAADEIGSGGANHRYIICKEGETCWCDGSNFIGVVAEILLQHGVRKDKNSQHGVIDSDLLEIVRDRMKAFQAGQFASEYNEKALEHIELALMYLNRRVEDRIERNVLGKNEK

SEQ ID NO: 521 - protein, 128 aa, synthetic construct
  REGION 1..128: note = TAD1 homologous AA sequence
MRKLSTIQKREKLNDVYAVDEIGPGGANHRYIICEEGETCWCDGSNIIGVVADIFLQRGPRKDKNSQHGVIDTDLLEIVRDRMKAFQAGPFASEYNEKALEHIELALMYLNRRVEDRIERNVLGKNEK

SEQ ID NO: 522 - protein, 128 aa, synthetic construct
  REGION 1..128: note = TAD1 homologous AA sequence
MRKLSTIQKREKLNDVYVADEIGQGGANHRYIICKEGETCWCDGSNFIGVVAEILLQRGPRKDKNSQHGVIDTDLLEIVRDRMKAFQAGQFASEYNEKALEHIELALMYLNRRVEDRIERNVLGKNEK

SEQ ID NO: 523 - protein, 115 aa, synthetic construct
  REGION 1..115: note = TAD1 homologous AA sequence
MRKVNIGTNNYTEVYATDEPAFNANHEYIVSAVNSTNDYAKVSFQKGAIKENGSNGCHNKDLIAIVIDRLECLNQGDFRCRENSIAITKLEEALMWLNKRTVDRRSRGVEGTRQK

SEQ ID NO: 524 - protein, 122 aa, synthetic construct
  REGION 1..122: note = TAD1 homologous AA sequence
MRKVNIGTNNYTEVYATDEPKFNANHKYEVRNVPSGGAVISEDEIYAKVSFQKGPIKENGVNGCHNEDLIAIVIDRLECLNQGDFRCKENSIAITKLKEALMWLNKRTLDRRLRRVEGTSQK

SEQ ID NO: 525 - protein, 122 aa, synthetic construct
  REGION 1..122: note = TAD1 homologous AA sequence
MRLVTDHVVNPVNDQLTIEVIDEPGSGGANHLYEVSGYRGQSGHEGALIEFQNGPIAEVGVNGLTHEVLLAIVADRLRSFQKGPFTCKANACALTHIEEAQHWLQQRTLERMRRGVEGTHTV

SEQ ID NO: 526 - protein, 134 aa, synthetic construct
  REGION 1..134: note = TAD1 homologous AA sequence
MRQITDHVFNPANDKLTITAIDAPGAGGAQHLYMVKGFDTSTNPSCPFTERHGSPATHATVLFQNGPINEVGVNGVTQEALLAIVADRLRSFQAGPFACRENALALTKIEEAQHWLQQRTLARMWRGVEGTHQL

SEQ ID NO: 527 - protein, 130 aa, synthetic construct
  REGION 1..130: note = TAD1 homologous AA sequence
MRTINDHKVNPANDKIEIRVTDEPGAGGANHVYEVWLPDMVVDGPGEGHTHGPTATIRFQNGPINENGVNGLTQEVLLAIVADRLRAFQSGPYACRENALALTKIEEAQHWLHSRTLARMSRGVEGTHKF

SEQ ID NO: 528 - protein, 121 aa, synthetic construct
  REGION 1..121: note = TAD1 homologous AA sequence
MRTINDHKVNPANDRIEIRVVDQPGAGGANHEYDVVIDNGTTGQIARISFQNGPIAEAGVNGLTQEVLLAIVADRLRSFQAGQYACRENALALTKIEEAMHWLHSRTRARVSRGVEGTHKV

SEQ ID NO: 529 - protein, 122 aa, synthetic construct
  REGION 1..122: note = TAD1 homologous AA sequence
MRTITDHVVNPANDKLNIDVLDDPGASGANHLYAIDGYVGKSGHRTTLIEFQNGPISEVGVNGITHEALLAIVADRLRSFQAGPFACRENALALTKIEEAQHWLQHRTLSRMRRGVEGTHTV

SEQ ID NO: 530 - protein, 122 aa, synthetic construct
  REGION 1..122: note = TAD1 homologous AA sequence
MRTITDHVVNPENDQLSIDVLDDPGAGGANHLYAIDGYVGKSGNRTTLIEFQNGPISEVGVNGITHEALLAIVADRLRSLQAGPFACRENALALTKIEEAQHWLQHRTLSRMRRGVEGTHTV

SEQ ID NO: 531 - protein, 122 aa, synthetic construct
  REGION 1..122: note = TAD1 homologous AA sequence
MRYINGHKVNPANDTLEVAAVDEPGLGGASHHYVVAHETNESVRTEIKFQNGAISIEGNGVNGLTHEVLLAIVADRLRSFQTGKFSCKANACALTHIEEAMHWLQSRTMERMRRGVEGTHAV

SEQ ID NO: 532 - protein, 106 aa, synthetic construct
  REGION 1..106: note = TAD1 homologous AA sequence
MSDYNAIKKLHEAVKAEQADHYIETINNKPVLDIQFQVGGTATTERNGVFIEDLLIVAYARLNAFNKQLPSRENSIALTKIEEAIMWLANRKTERELRGVYGTEQE

SEQ ID NO: 533 - protein, 125 aa, synthetic construct
  REGION 1..125: note = TAD1 homologous AA sequence
MSELSTIQKREKLNHILSKDEVGPGGAHHNYLIISNEANISTEQPLFATEIQFQQGARKEEDSIHGVIDTDLLEIVRDRLKSFQAGPFSSEYNAKALEHVEEALMWMNRRVEDRIERNVLGTNNK

SEQ ID NO: 534 - protein, 151 aa, synthetic construct
  REGION 1..151: note = TAD1 homologous AA sequence
MSENTQAPADLPQEQIELLGHKINAANESLTVLAVDRPAAGGAHCVYTIGGYNVRKNPHYIGGPPWLADGSVAITALFFQNGDIDRGNNVNGITHEALLAILVHRLECFQAGPFACRENAIALTKLQEAQHWLHHRTRGRMERGVEGTHQV

SEQ ID NO: 535 - protein, 206 aa, synthetic construct
  REGION 1..206: note = TAD1 homologous AA sequence
MSKKLLALSMVAYIGTKSVLATPMTRGEYNEYQGWQIPENEDPSDPGYLIEYKDGGKANHPDHEGYISWSPKDVFEHSYQPDGFQNCVMGREIHKDDNEVTVFHNETVKTRDDEQSLEPGHFYDVVAGDSLTPIQFQLGPVKEVGVNGITNEALIAIVLHRLRVLNEKFPCRENSLAITNIEQGQMWLEQRTRNRQKRGVEGFNIA

SEQ ID NO: 536 - protein, 206 aa, synthetic construct
  REGION 1..206: note = TAD1 homologous AA sequence
MSKKLLTASMVAYIGIKSVLATPMTRGEYNEYRGWQIPENEDPSDPGYLIEYKDGGKANHPDHEGYISWSPKDVFEHSYQPDCVQNIVSGREIHKDDNDVTVTHNETVKTRDGEQSLEPGHFYDVIAGDLLTPIQFQLGPVKEVGVNGVTNEALLAIVLHRLRVLNEKFPCRENSLAITNLEQGQMWLEQRTRNRQKRGVEGFNIA

SEQ ID NO: 537 - protein, 206 aa, synthetic construct
  REGION 1..206: note = TAD1 homologous AA sequence
MSKKLLTASMVAYIGTKSVLATPMTRGEYNEYQGWQIPENEDPADPGYLIEYKDGGKANHPDHEGYISWSPKDVFEHSYQPDGIQNCVMGREIHKDDNEVTVFHNETVKTRDGEQSLEPGHFYDVVAGDLLTPIQFQLGPVKEVGVNGITNEALLAIVLHRLRVLNEKFPCRENSLAITNIEQGQMWLEQRTRNRQKRGVEGFNIA

SEQ ID NO: 538 - protein, 206 aa, synthetic construct
  REGION 1..206: note = TAD1 homologous AA sequence
MSKKLLTASMVAYIGTKSVLATPMTRGEYNEYQGWQIPENEDPSDPGYLIEYKDGGKANHPDHEGYISWSPKDVFEHSYQLDGFQNCVMGREIHKDDNGVIVTHNETVKTRDGEQSLETGHFYDIVTGDSLTPIQFQLGPVKEVGVNGITNEALLAIVLHRLRVLNEKFPCRENSLAITNIEQGQMWLEQRTRNRQKRGVEGYNIA

SEQ ID NO: 539 - protein, 206 aa, synthetic construct
  REGION 1..206: note = TAD1 homologous AA sequence
MSKKLLTASMVAYIGTKSVLATPMTRGEYNEYQGWQIPENEDPSDPGYLIEYKDGGKANHPDHEGYISWSPKDVFEHSYQLDGFQNCVMGREIHKDDNGVTVTHNETVKTRDGEQSLETGHFYDIVTGDSLTPIQFQLGPVKEVGVNGITNEALLAIVLHRLRVLNEKFPCRENSLAITNIEQGQMWLEQRTRNRQKRGVEGYNIA

SEQ ID NO: 540 - protein, 206 aa, synthetic construct
  REGION 1..206: note = TAD1 homologous AA sequence
MSKKLLTASMVAYIGTKSVLATPMTRGEYNEYQGWQIPENEDPSDPGYLIEYKDGGKANHPDHEGYISWSPKDVFEHSYQPDGFQNCVMGREIHKDDNEVTVFHNETIKTRDDEQSLEPGHFYDVVAGDSLTPIQFQLGPVKEVGVNGITNEALLAIVLHRLRVLNEKFPCRENSLAITNIEQGQMWLEQRTRNRQKRGVEGFNIA

SEQ ID NO: 541 - protein, 206 aa, synthetic construct
  REGION 1..206: note = TAD1 homologous AA sequence
MSKKLLTASMVAYIGTKSVLATPMTRGEYNEYQGWQIPENEDPSDPGYLIEYKDGGKANHPDHEGYITWSPKDVFEHSYQLDGFQNCVMGREIHKDDNGVTVTHNETVKTCDGEQSLETGHFYDIVTGDSLTPIQFQLGPVKEVGVNGITNEALLAIVLHRLRVLNEKFPCRENSLAITNIEQGQMWLEQRTRNRQKRGVEGFNIA

SEQ ID NO: 542 - protein, 206 aa, synthetic construct
  REGION 1..206: note = TAD1 homologous AA sequence
MSKKLLTASMVAYIGTKSVLATPMTRGEYNEYQGWQIPENEDPSDPGYLIEYKDGGKANHPDHEGYITWSPKDVFEHSYQLDGFQNCVMGREIHKDDNGVTVTHNETVKTRDGEQSLETGHFYDIVTGDSLTPIQFQLGPVKEVGVNGITNEALLAIVLHRLRVLNEKFPCRENSLAITNIEQGQMWLEQRTRNRQKRGVEGFNIA

SEQ ID NO: 543 - protein, 156 aa, synthetic construct
  REGION 1..156: note = TAD1 homologous AA sequence
MSNQHRILVGHQVNPANDTLTVAVLDRPGRGGACHAYQVSGANMARHPFMRQAVREFAGSDLSDAQVDAAFAQASDGDTSSLILFQDGPIAEAGVNGVTHEVLLAILIDRLEGFQAGPYACEANSKALEHIKYAQQRLLERTRQRMARGMEGTHKV

SEQ ID NO: 544 - protein, 97 aa, synthetic construct
  REGION 1..97: note = TAD1 homologous AA sequence
MSPENNKYRLEPFIGADGVALEQEVIFYKMNLDGTSEPGTTLEQMLIVSIARLNDLDKRFPCRENALAITKMEEALMWLNKRTENRISRGVEGKHII

SEQ ID NO: 545 - protein, 122 aa, synthetic construct
  REGION 1..122: note = TAD1 homologous AA sequence
MSRKLVNSRIFTAVYSNDEKGEGGAKHYYTIVSNETHNVNETPKVFANIQFQNGAILENGINGCQNEDLIEVVLDRLRDFQNGKFPCRENAIAITKLEEALMWLDKRTLDRKERGVEGISIA

SEQ ID NO: 546 - protein, 128 aa, synthetic construct
  REGION 1..128: note = TAD1 homologous AA sequence
MSTEARKLSTIQKREKLNDVYAMNERGNGGANHTYAVHKCGNNTVFETEPLAVIQFQDGARKIPDSIPGVLDTDLLEIVRDRLKGFQSGEFSCRENACALTHIEEALMWMNRRVEDRIERDVLGTNNK

SEQ ID NO: 547 - protein, 128 aa, synthetic construct
  REGION 1..128: note = TAD1 homologous AA sequence
MSVEKLNTIQKRNNLNEVYRNDEPGAGGACHVYVICHRVFPVGEKERVVPIAEIVFQHGPRNEEGSATGILDADLLEIVRDRLKAFQTGEYATRENACAITHIEEALMWMNKRAEDRAERGVLGTMQK

SEQ ID NO: 548 - protein, 128 aa, synthetic construct
  REGION 1..128: note = TAD1 homologous AA sequence
MSVEKLNTIQKRNNLNEVYRNDKPGAGGACHVYVICHRVFPVGEKERVVPIAEIVFQHGPRNEEGSATGILDADLLEIVRDRLKAFQTGEYATRENACAITHIEEALMWMNKRAEDRAERGVLGTMQK

SEQ ID NO: 549 - protein, 210 aa, synthetic construct
  REGION 1..210: note = TAD1 homologous AA sequence
MTEQKEQECEELKREIAFGNNGKLSDKIRAIVFKNLNDENSKYKQTLDEIEKYCEEQNLKYDNTACDILNIINNTEENNTINNNEQNQKEKKFIYGESKGCTAIYAVDEPSPNNNSYHEFIINYEPDSKTTEFLGKIKLQNGNFAEFGHNGIFTEHLLVIAKDCLERFNTSKYACQENSIAINNINNALMWLNKRATERVKRGVYGTETV

SEQ ID NO: 550 - protein, 120 aa, synthetic construct
  REGION 1..120: note = TAD1 homologous AA sequence
MTKINFRIQRNNNLNDVFVEDLAGPGNGRHNYEIRRADTGEKLLDVQFQNGARKEENSVAGILDSDLLEIVRHRLQSFQNGEYKTRENACALTHIEEALMWMSKRADDRAERGVLGTMNK

SEQ ID NO: 551 - protein, 120 aa, synthetic construct
  REGION 1..120: note = TAD1 homologous AA sequence
MTKINFRIQRNNNLNEIFVEDLAGPGNGRHNYEIHRADTGETLLNLQFQNGARKEENSIAGVLDNDLLEIVRHRLQCFQQGEYKTRENACALTHIEEALMWMSKRADDRAERGVLGTMNK

SEQ ID NO: 552 - protein, 123 aa, synthetic construct
  REGION 1..123: note = TAD1 homologous AA sequence
MTNYMKLEHELLDGEYTEVWCDEPKPDYFHHAPHKFQVVATEDRDTLALIRFQEGAIKEHGVNGVTNEDLILMIMKRLECFQETKYACHDNEEALNGLHKALYHLTARTRERKARGVEGTHQV

SEQ ID NO: 553 - protein, 123 aa, synthetic construct
  REGION 1..123: note = TAD1 homologous AA sequence
MTNYMKLEHELLDGEYTEVWCDEPKPDYVHHAPHKFQVVATEDRDTLALIRFQEGAIKEHGVNGVTNEDLILMIMKRLECFQETKYACHDNEEALNGLHKALYHLTARTRERKARGVEGTHKV

SEQ ID NO: 554 - protein, 123 aa, synthetic construct
  REGION 1..123: note = TAD1 homologous AA sequence
MTNYMKLEHELLDGEYTEVWCDEPKPDYVHHAPHKFQVVATEDRDTLALIRFQEGAIKEHGVNGVTNEDLILMIMKRLECFQETKYACHDNEEALNGLHKALYHLTARTRERKARGVEGTHQV

SEQ ID NO: 555 - protein, 123 aa, synthetic construct
  REGION 1..123: note = TAD1 homologous AA sequence
MTNYMKLEHELLDGEYTEVWCDEPKPDYVHHAPHKFQVVATEDRDTLALIRFQEGAIKEHGVNGVTNEDLILMVMKRLECFQETKYACRDNEEALNGLHKALYHLTNRTRERKARGVEGTHQV

SEQ ID NO: 556 - protein, 123 aa, synthetic construct
  REGION 1..123: note = TAD1 homologous AA sequence
MTNYMKLEHELLDGEYTEVWCDEPKQNYVHHAPHKFQVVATEDRDTLALIRFQEGAIKEHGVNGVTNEDLILMIMKRLECFQETKYACRDNEEALNGLHKALYHLTNRTRERKARGVEGTHEV

SEQ ID NO: 557 - protein, 123 aa, synthetic construct
  REGION 1..123: note = TAD1 homologous AA sequence
MTNYMKLEHELLEGEYTEVWCNEPKEDYLHFAPHRFQVVATEDRDTLALIRFQEGAIKEHGVNGVTNEDLILMIMKRLESFQESKFACHDNEEALNALHKALYHLTNRTRERKARGVEGTHKV

SEQ ID NO: 558 - protein, 151 aa, synthetic construct
  REGION 1..151: note = TAD1 homologous AA sequence
MTQDNNEEIALTTDVGSDGDLLVEQFLGFTDKDIGDEEFEKLMAGQTVEGVTAYKPATYYKISADPSSTDYNEPFDIHLHFQDGPTFIDGVNGATNESLLKILIHRTQYLDSKFPSDQNKQAIAAMQSALGAFDARTAERQARGVEGQPVE

SEQ ID NO: 559 - protein, 151 aa, synthetic construct
  REGION 1..151: note = TAD1 homologous AA sequence
MTQENNEEFALVTDVGSDGNLIVEQFLGFANRDVNDEEFEQVLTGQPVDGITAYQPGTYYKISADPTSIDYNEPFDIHIHFQEGPTVIDGVNGATNESLLKILIHRTKLLDAQFPSEQNKQAIVSLESALDAFNARTAERQERGVEGQHIE

SEQ ID NO: 560 - protein, 131 aa, synthetic construct
  REGION 1..131: note = TAD1 homologous AA sequence
MTQKDLGNSVWGVDIHTDHNGVSVTHHLFVDPEKEGDEPTKLPAGHFYDVIAGETITPIHFQNGPVKEHGVNGATSEALLAILIHRTKVLNDNFPCDENKRAISYMENALALFEQRTKERQARGVEGQNLA

SEQ ID NO: 561 - protein, 137 aa, synthetic construct
  REGION 1..137: note = TAD1 homologous AA sequence
MTRSINDHVVNPANDLLTIRAIDEPGAGGANHAYLVEGFDNSTNPSDPDDQDADTTLILFQNGPINEVGVNGITQEVLLAIVADRLRSFQAGPFSCRENALALTKIEEAMHWLQQRTIRRMRAGVEGTHAKTTGDGA

SEQ ID NO: 562 - protein, 137 aa, synthetic construct
  REGION 1..137: note = TAD1 homologous AA sequence
MTRSINDHVVNPANDLLTIRAIDEPGAGGANHAYLVEGFDNSTNPSDPDDQDANTTLILFQNGPINEVGVNGVTQEVLLAIVADRLRSFQAGPFSCRENALALTKIEEAMHWLQQRTLRRMRAGVEGTHAKATGDGA

SEQ ID NO: 563 - protein, 141 aa, synthetic construct
  REGION 1..141: note = TAD1 homologous AA sequence
MTRSINDHVVNPANDQLTITVTDEPGAGGANHLYMIEGFDTESNASDPFTARHGQPAKHATILFQNGPIAEVDVNGITQEVLLAIVADRLRSFQAGPFSCRENALALTKIEEAMHWLQQRTLRRMRAGVEGTHAKATGDGA

SEQ ID NO: 564 - protein, 141 aa, synthetic construct
  REGION 1..141: note = TAD1 homologous AA sequence
MVGAFIIPKIKEDLLMEKLITIQKREKLNEVYAVDEKGNGGANHEYVISYEVFPVGKPKEIHEVVTIQLQNGARKEENSIHGVIDSDLLEIVRHRLQCFQAGQFASRENACALTHIEEALMWMNRRVEDRIERNVLGTNNK

SEQ ID NO: 565 - protein, 119 aa, synthetic construct
  REGION 1..119: note = TAD1 homologous AA sequence
MVKLSTIQKHNNLNTIYRSAEKGPGGGYHSYTVMDADGTKVVAQIEFQKGARNDPNARHGVLDADLLEIVRDRLTAFNKGEFATRENACAITHIEEALMWMAKRADDRAERGVLGTYNK

SEQ ID NO: 566 - protein, 119 aa, synthetic construct
  REGION 1..119: note = TAD1 homologous AA sequence
MVKLSTIQKHNNPHAILRSDNEGLGGGYHDYTVMDVDRKSVIAQIKFQKGARNDPNARRGVLDADLLEIVRDRLMAFNKGEFATRENACAITHIEEALMWMAKRADDRAERGVLGTYNK

SEQ ID NO: 567 - protein, 119 aa, synthetic construct
  REGION 1..119: note = TAD1 homologous AA sequence
MVKLSTIQKHNNPHAILRSDNEGPGGGYHDYTVMDMDRKSVIAQIKFQKGARNDPNARHGVLDADLLEIVRDRLTAFNKGEFATRENACAITHIEEALMWMAKRADDRAERGVLGTYNK

SEQ ID NO: 568 - protein, 119 aa, synthetic construct
  REGION 1..119: note = TAD1 homologous AA sequence
MVKLSTIQKHNNPHAILRSDNEGPGGGYHDYTVMDVDRKSVIAQIKFQKGARNDPNARHGVLDADLLEIVRDRLTAFNKGEFATRENACAITHIEEALMWMAKRADDRAEHGVLGTYNK

SEQ ID NO: 569 - protein, 119 aa, synthetic construct
  REGION 1..119: note = TAD1 homologous AA sequence
MVKLSTIQKHNNPHAILRSDNEGPGGGYHDYTVMDVDRKSVIAQIKFQKGARNDPNARHGVLDADLLEIVRDRLTAFNKGEFATRENACAITHIEEALMWMAKRADDRAERGVLGTYNK

SEQ ID NO: 570 - protein, 119 aa, synthetic construct
  REGION 1..119: note = TAD1 homologous AA sequence
MVKLSTIQKHNNPHAILRSDNEGPGGGYHDYTVMDVDRKSVIAQIKFQKGARNDPNARRGVLDADLLEIVRDRLMAFNKGEFATRENACAITHIEEALMWMAKRADDRAERGVLGTYNK

SEQ ID NO: 571 - protein, 119 aa, synthetic construct
  REGION 1..119: note = TAD1 homologous AA sequence
MVKLSTIQKHNNPHAILRSDNEGPGGGYHDYTVMDVDRKSVIAQIKFQKGARNDSNARHGVLDADLLEIVRNRLTAFNKGEFATRENACAITHIEEALMWMAKRADDRAERGVLGTYNK

SEQ ID NO: 572 - protein, 119 aa, synthetic construct
  REGION 1..119: note = TAD1 homologous AA sequence
MVMLSVIQKNNNPHAILRSDNEGPGGGYHDYTVMDVDRKSVIAQIRFQKGARNDPNARDGVLDADLLEIVRDRLTAFNKGEFATRENACAITHIEEALMWMAKRADDRAERGVLGTYNK

SEQ ID NO: 573 - protein, 119 aa, synthetic construct
  REGION 1..119: note = TAD1 homologous AA sequence
MYKLDTIQKREKLNKVYPHDEEGNGGANHAYLINTADKAQTVGCIQFQNGARKEEGSVPGVANEDLLEIVRHRLQCFQAGPYSSRENACALTHIEEALMWLNRRVEDRIERNVLGTKNK

SEQ ID NO: 574 - protein, 122 aa, synthetic construct
  REGION 1..122: note = TAD1 homologous AA sequence
MYKLNTIQKREKLNEVYVLDDKGPGGANHVYMICKKDKDILDSVLVDINFQKGPRKEGSSTNGILDTDLLEIVRNRLQGFQEGPYACEYNEKALKHIEEALMWLNRRVEDRIDRNVLGTNNK

SEQ ID NO: 575 - protein, 119 aa, synthetic construct
  REGION 1..119: note = TAD1 homologous AA sequence
MYKLNTIQKRENLNNVYPHDEEGNGGANHAYLITTADKAQTVGCIQFQNGARKEEGSVPGVANEDLLEIVRHRLQCFQAGPYSSRENACALSHIEEALMWLNRRVEDRIERNVLGTKNK

SEQ ID NO: 576 - protein, 103 aa, synthetic construct
  REGION 1..103: note = TAD1 homologous AA sequence
VIHSEHWNDTNGNPAGGTTFGRGFAIGWQNGPLGRGAERSEPNGAFVEDIIAAAADRLQYYQDSRFASKYNATALLHLDEALRALNARTADREDRDVEGTHAE

SEQ ID NO: 577 - protein, 67 aa, synthetic construct
  REGION 1..67: note = TAD1 homologous AA sequence
VKENGLNGIFIEDLILICINQLEHFQASKFKCKENESTLRHLYDALATTRSRQYERQLRNVQGKNLK

SEQ ID NO: 578 - DNA, 198 bp, synthetic construct
  misc_feature 1..198: note = HAD1 homologous NA sequence
  source 1..198: mol_type = other DNA
atgaagcgcccagttaccgaagttattgcgcagcttaacgcgctgcctcatgacgcgaaagtcgacgtaatcaacgtttggacgaacgggcgcaagattcgccgacttagtgggcagaacgcggacagcgtttggcatcctgcgcctgaataccgcaagatgaccgcaattttaatttcggaggtgggcgcagaatga

SEQ ID NO: 579 - DNA, 198 bp, synthetic construct
  misc_feature 1..198: note = HAD1 homologous NA sequence
  source 1..198: mol_type = other DNA
atgaagcgcccgatcaacgaagtaatcgcgatgcttaacgcgctgccgcttgacgctgagatcgacgtactcaacgtgtggtcgaacggccgtaaagtccgccggctctgcggtcaagacgaggatagcgtatggcatcccgccggcgagttccgcaagatggtcgcgattttacttccggaggtgagcgttgaatga

SEQ ID NO: 580 - DNA, 198 bp, synthetic construct
  misc_feature 1..198: note = HAD1 homologous NA sequence
  source 1..198: mol_type = other DNA
atgaagcgcccggtcaacgaagtaatcgcgatgctcaatgcgctaccgctcgacgcggagatcgacgtactcaacgtgtggtcgaacggtcggaaaatccgccggctctgcggtcaagacgaagatagcgtatggcatcccgcgagtaagttccgcaagatgaccgcaatattaattccggaggtgagcgcagaatga

SEQ ID NO: 581 - DNA, 219 bp, synthetic construct
  misc_feature 1..219: note = HAD1 homologous NA sequence
  source 1..219: mol_type = other DNA
atgatacataacaaagatgatgtgaaagcagttatagaggaattagaagtttctgaccatatggacatcgttggtttcgttaacatctggtctaatggtgttaagattcgtcgatatcaaggacaggacaagcttaaatacatagaaacaagtaaagacaaaggctacaaaaagatggtagctattttagtagaggtagaagaagaagatttattttaa

SEQ ID NO: 582 - DNA, 219 bp, synthetic construct
  misc_feature 1..219: note = HAD1 homologous NA sequence
  source 1..219: mol_type = other DNA
atgatacataacaaagatgatgtgaaagcagttattgaagagttagaagtttctgaccatatggatattgtaggtttcgttaacatctggtctaatggtgttaagattcgtagatatcagggacaggacaagcttaactacggagaaacaagtaaagacaaaggctacaaaaagatggtagctattttagtagaggtagaagaagaagatttattttaa

SEQ ID NO: 583 - DNA, 210 bp, synthetic construct
  misc_feature 1..210: note = HAD1 homologous NA sequence
  source 1..210: mol_type = other DNA
atgatacataaccgagatgatgtgaaagcagttattgaagagttagaagtttctgaccatatggatattgtaggtttcgttaacatctggtctaacggtgttaagattcgtcgatatcagggacaggacaagcttaactacggagaaacaagtaaagacaaaggctacaaaaagatggtagctattttagtagaagttgaggaggaatag

SEQ ID NO: 584 - DNA, 210 bp, synthetic construct
  misc_feature 1..210: note = HAD1 homologous NA sequence
  source 1..210: mol_type = other DNA
atgatacataaccgagatgatgtgaaagcagttattgaagagttagaagtttctgaccatatggatattgtaggtttcgttaacatctggtctaatggtgttaaaattcgtcgatatcaaggacaggacaagcttaactacggagaaacaagtaaagacaaaggctacaaaaagatggtagctattttagtggaagttgaggaggaatag

SEQ ID NO: 585 - DNA, 219 bp, synthetic construct
  misc_feature 1..219: note = HAD1 homologous NA sequence
  source 1..219: mol_type = other DNA
atgatacataaccgagatgatgtgaaagctgttatagaggaattagaagtttctgaccatatggatgttgtaggtttccttaatgtctggtctaatggcgttaagattcgtcgatatcaagggcaggacaagcttaactacggagaaacaagtaaagacaaaggctacaaaaagatggtagctattttagtagaggtagaagaagagggtttattttaa

SEQ ID NO: 586 - DNA, 216 bp, synthetic construct
  misc_feature 1..216: note = HAD1 homologous NA sequence
  source 1..216: mol_type = other DNA
atgccatctaaagagctacctgtagtagataaagagattgctaaagctgtcattgattttgatggagctgtagtgagaagtgtacataatgtgtggtctaacggaacagtagtccgtagataccaagggcaagataaacattggacaaacaacaatcctagtaagggttacaaaaaaatgagagtaatcgtagtagattgcttggaggaggagtaa

SEQ ID NO: 587 - DNA, 216 bp, synthetic construct
  misc_feature 1..216: note = HAD1 homologous NA sequence
  source 1..216: mol_type = other DNA
atgccatctaaagagctacctgtagtagataaagagattgctaaagctgtcattgattttgatggagctgtagtgagaagtgtacatagcgtatggtctaacggaacagtagtccgtagatatcaagggcaagacagacattggacaaataataatcctagtaagggttataaaaaaatgagagtaatcgtagtagattgcttagaggaggagtaa

SEQ ID NO: 588 - DNA, 216 bp, synthetic construct
  misc_feature 1..216: note = HAD1 homologous NA sequence
  source 1..216: mol_type = other DNA
atgccatctaaagagttacctgtagtagataaagagattgctaaagctgtcattgattttgatggggctgtagtgagaagtgtacataatgtatggtctaacggaacagtagtccgtagatatcaaggacaagacagacattggacaaacaataatcctagtaagggttataaaaaaatgagagtaatcgtagtagattacttagaggaggagtaa

SEQ ID NO: 589 - DNA, 255 bp, synthetic construct
  misc_feature 1..255: note = HAD1 homologous NA sequence
  source 1..255: mol_type = other DNA
atggaaaagcaaatcgaagctctctctattgcacttcactgtatgtgggagcattctgacgaccctttggtgaaggaagcaggaagagttttagaggaaataagagagaaagctgagaacgcaagtcgagtatttaccaatggaaaaggctttaggaaatatgtaggacaagacaaaaaggatacagacaacgctagaaaaggatggtatcaagcagatgtcatgatattcaagcgagaggataatcaatgttga

SEQ ID NO: 590 - DNA, 225 bp, synthetic construct
  misc_feature 1..225: note = HAD1 homologous NA sequence
  source 1..225: mol_type = other DNA
atggctaagaagcaaactgacgttagtaaagtgaaagacatcctggctgatctaaatgtagcggagcatctgaaaattgtgaactgcttcagtgcctggtcagacggtagtattactagacggtatacaggtcaaggtgagggtagtaaccgtagccctaaaaaaggatataagaagatggtagctattttagtggagctgcctgaagaagagatacagggttaa

SEQ ID NO: 591 - DNA, 213 bp, synthetic construct
  misc_feature 1..213: note = HAD1 homologous NA sequence
  source 1..213: mol_type = other DNA
atggtacataacagaaaagatgtaaaagatgttatagaggcgttagaggtttctgaccacttagatattgtaaaatacatagatgtctggtctaacggtgttacaattcgtcgttggcaaggacaaggtaaagggaataatagaagtccagaaaatggatataaaaagatggtagctattttagtagaggtagaagaagaaggtttattttaa

SEQ ID NO: 592 - DNA, 237 bp, synthetic construct
  misc_feature 1..237: note = HAD1 homologous NA sequence
  source 1..237: mol_type = other DNA
ttgaactggaggagattgataatgccatctaaagagctacctgtagtagataaagagattgctaaagctgtcattgattttgatggagctgtagtgagaagtgtacataatgtatggtctaacggaacagtagtccgcagataccaagggcaagataaacattggacaaacaacaatcctagtaagggttataaaaaaatgaaagtaatcgtagtagattgcttggaggaggaataa

SEQ ID NO: 593 - DNA, 162 bp, synthetic construct
  misc_feature 1..162: note = HAD1 homologous NA sequence
  source 1..162: mol_type = other DNA
ttgagaaaggaaataattctaacagtttggactaatggaaatgctatccgtaaatataccggtcaagataaaacaattagtaagtataaattaaaagactggtacaaagctacagcagtaataactaaggaggaagaaactaatgagacaaaaactaattaa

SEQ ID NO: 594 - DNA, 219 bp, synthetic construct
  misc_feature 1..219: note = HAD1 homologous NA sequence
  source 1..219: mol_type = other DNA
ttgagcgacatttcctccgctattacccgcctgaaatatctgacgaggccggacgctaaaataacgatccgcaccgtatggtcaaacggccgatccgtccgtaactaccagagtcaggataagccgggagcgtacgtagttacccggacggctccggaaggttaccggaaaatgacgatgattttaatagacgaaagtaatgaggaggcggcggaatga

SEQ ID NO: 595 - protein, 72 aa, synthetic construct
  REGION 1..72: note = HAD1 homologous AA sequence
LSDISSAITRLKYLTRPDAKITIRTVWSNGRSVRNYQSQDKPGAYVVTRTAPEGYRKMTMILIDESNEEAAE

SEQ ID NO: 596 - protein, 74 aa, synthetic construct
  REGION 1..74: note = HAD1 homologous AA sequence
MAKKQTDVSKVKDILADLNVAEHLKIVNCFSAWSDGSITRRYTGQGEGSNRSPKKGYKKMVAILVELPEEEIQG

SEQ ID NO: 597 - protein, 84 aa, synthetic construct
  REGION 1..84: note = HAD1 homologous AA sequence
MEKQIEALSIALHCMWEHSDDPLVKEAGRVLEEIREKAENASRVFTNGKGFRKYVGQDKKDTDNARKGWYQADVMIFKREDNQC

SEQ ID NO: 598 - protein, 72 aa, synthetic construct
  REGION 1..72: note = HAD1 homologous AA sequence
MIHNKDDVKAVIEELEVSDHMDIVGFVNIWSNGVKIRRYQGQDKLKYIETSKDKGYKKMVAILVEVEEEDLF

SEQ ID NO: 599 - protein, 72 aa, synthetic construct
  REGION 1..72: note = HAD1 homologous AA sequence
MIHNKDDVKAVIEELEVSDHMDIVGFVNIWSNGVKIRRYQGQDKLNYGETSKDKGYKKMVAILVEVEEEDLF

SEQ ID NO: 600 - protein, 69 aa, synthetic construct
  REGION 1..69: note = HAD1 homologous AA sequence
MIHNRDDVKAVIEELEVSDHMDIVGFVNIWSNGVKIRRYQGQDKLNYGETSKDKGYKKMVAILVEVEEE

SEQ ID NO: 601 - protein, 72 aa, synthetic construct
  REGION 1..72: note = HAD1 homologous AA sequence
MIHNRDDVKAVIEELEVSDHMDVVGFLNVWSNGVKIRRYQGQDKLNYGETSKDKGYKKMVAILVEVEEEGLF

SEQ ID NO: 602 - protein, 65 aa, synthetic construct
  REGION 1..65: note = HAD1 homologous AA sequence
MKRPINEVIAMLNALPLDAEIDVLNVWSNGRKVRRLCGQDEDSVWHPAGEFRKMVAILLPEVSVE

SEQ ID NO: 603 - protein, 65 aa, synthetic construct
  REGION 1..65: note = HAD1 homologous AA sequence
MKRPVNEVIAMLNALPLDAEIDVLNVWSNGRKIRRLCGQDEDSVWHPASKFRKMTAILIPEVSAE

SEQ ID NO: 604 - protein, 65 aa, synthetic construct
  REGION 1..65: note = HAD1 homologous AA sequence
MKRPVTEVIAQLNALPHDAKVDVINVWTNGRKIRRLSGQNADSVWHPAPEYRKMTAILISEVGAE

SEQ ID NO: 605 - protein, 78 aa, synthetic construct
  REGION 1..78: note = HAD1 homologous AA sequence
MNWRRLIMPSKELPVVDKEIAKAVIDFDGAVVRSVHNVWSNGTVVRRYQGQDKHWTNNNPSKGYKKMKVIVVDCLEEE

SEQ ID NO: 606 - protein, 71 aa, synthetic construct
  REGION 1..71: note = HAD1 homologous AA sequence
MPSKELPVVDKEIAKAVIDFDGAVVRSVHNVWSNGTVVRRYQGQDKHWTNNNPSKGYKKMRVIVVDCLEEE

SEQ ID NO: 607 - protein, 71 aa, synthetic construct
  REGION 1..71: note = HAD1 homologous AA sequence
MPSKELPVVDKEIAKAVIDFDGAVVRSVHNVWSNGTVVRRYQGQDRHWTNNNPSKGYKKMRVIVVDYLEEE

SEQ ID NO: 608 - protein, 71 aa, synthetic construct
  REGION 1..71: note = HAD1 homologous AA sequence
MPSKELPVVDKEIAKAVIDFDGAVVRSVHSVWSNGTVVRRYQGQDRHWTNNNPSKGYKKMRVIVVDCLEEE

SEQ ID NO: 609 - protein, 53 aa, synthetic construct
  REGION 1..53: note = HAD1 homologous AA sequence
MRKEIILTVWTNGNAIRKYTGQDKTISKYKLKDWYKATAVITKEEETNETKTN

SEQ ID NO: 610 - protein, 70 aa, synthetic construct
  REGION 1..70: note = HAD1 homologous AA sequence
MVHNRKDVKDVIEALEVSDHLDIVKYIDVWSNGVTIRRWQGQGKGNNRSPENGYKKMVAILVEVEEEGLF

SEQ ID NO: 611 - DNA, 960 bp, synthetic construct
  misc_feature 1..960: note = GAD1 homologous NA sequence
  source 1..960: mol_type = other DNA
atgaaaaataaaataatgttaattaagacagacaaatgctgttttatatcggatttgtacactaataaaaaagatagttatgattataattatcaccattcggcatttgtaaattggctatttgacgataaaaagtgtacccaaacttgggcaaaacattggtttcgcatagaaaaataccctgaaaccattactgtggagtgcgttgagaccataaataagcgatatgaaataaaagataaaaaatatattacagatagtttaccagcagtaatactttgtgcaaataaaaatgattacgatgaggatgtgattgactcattgtatgaatttaaaaaggatactatcactagccagcaaaaggttgatgtagaaattgaaacagttttagaagttgagaatttccatgaagtgccatttgattttgtgggtatccatgaaataaattttggggataagccctatcatattacaagtgcagatgtacaccatcagcttatagatgaaataatgataccccaagtgctcttaacagaatacccgtgccgattaacatctaagcagatgtatgatatcacaagacaatatgttagggaacatatagataaagaacaagcatcaataacttctgactatgatttttgttttacagtcaaaaagataattccgttatatgaaccagaaacattaagctatcactatatatttgccagaactaaaaaagaaagagaaaaagtacatttcagagtagctaaacataaagagtcaacaatatttgagatgacagacgatattaatcattatagtggatactcaattattgaagggttgactgctaacagtgaaaaagagctaaaagaaaaagttgacctgtggttaacggaattgatgaaaaagataaataaaccattatgcacatgcgataaatgtaaaggaatagggataatcgataaggcgtaa

SEQ ID NO: 612 - DNA, 906 bp, synthetic construct
  misc_feature 1..906: note = GAD1 homologous NA sequence
  source 1..906: mol_type = other DNA
atgaaaaggggatttttaatgaagcttattggtattaaaacaaataactgttttctggtgtctgacaatattcaaggcgatagctatttttacagtcaactagataatttgcttttcgatgggaaacgagcagctaaaacgtataagtctgactggttcaagctagataaggaaccaagtgttattgagaagcaaatgccagctcaagaaatcaatcatagatatgaattaaaagaagggttccaggaaactgacttaactccaaaagtaattgatgtctcttacatagatgaagaaagcgaatactacgaagtaaaaggtctatatgatttgaaatttgaagaagtcccacagcagaatgaaaagattgagtttgaaatgaatgtaattgaagaatttgacggagaacttaagttgaaaagtcataatttcaacttgaaatataacttgctggatagaattcaaacgcatccaatgcttcttgaaacaaagccgtgttacctgtctcaagaagaaagctataaaattatcagaaaccatattaaagcaaatattaaccctaaatttgcaagaatcacaagtgattatgatttctgtttaactgtggtcaaagttttggaactctacaaaccttatgagtatgttgttgatattaatgcaatgtacaaacggagaaagcctaagcttgagaaaagatttcagacaaagcgggaagttgaaatttacaatgttgcacctaaagcttatcagaactactcaattgtagagccatttagtggaaatgacgttgaagatctaaagagtaacattaagaagtttttagatgatttgatggctaaaatcaacgagccattagtcgaatgtaaatgttgcaaaggaagaggggttattttaaatgaaaattaa

SEQ ID NO: 613 - DNA, 864 bp, synthetic construct
  misc_feature 1..864: note = GAD1 homologous NA sequence
  source 1..864: mol_type = other DNA
atgaaaatacaattaattaaaactaaagataaatatttatataaatttgttggttattgttacatcagcgaccatttaatgaatggaaaagaaatacaagaaacattcaataataattggtatgttattaatgaatatccaaatttattacaagaaaaagaaactatcaaaattaatgaaagatggactttaaaaaacaaagatttatacaatgaaacaattccattaattgtggatgaacattcaaaagaaaaatataaaaatttggttgatagtgatttatacgaatatacatatgaagaaaaagaaatttacaaaaaggttgaattggaaatagaagaactaggtgaaatagatgacgatattccatttgaacacaaagaaatattacaaactgaatttgggtggtattcaagaggtaaaaaagaagtttatttaataaatgaagttaatttttctctaaaagataattgcttaacaccaacaccaattaaagaattaacaaaaccttgcatgttaaaaaaagaatttttacatcaaatattaactgattacataaaaagaaatattgatttaacttatgcaaaagtaaaagatgattatgattggagatttaatgttgttacaaataatcaaagacagatgtatattttatcttggtcaagtgatagaaatgataaaaattggactttgcaaaatctatatgctaacaattttaaagaattagtcaaaaaaataaaacaaatggaaaatgaaataataacttatattaacaaagaccatgtatgcccatattgtaatggtacggggtgtaaaactgaaaaatttgatactaataagtggtttagcgaggtgaacaaatga

SEQ ID NO: 614 - DNA, 864 bp, synthetic construct
  misc_feature 1..864: note = GAD1 homologous NA sequence
  source 1..864: mol_type = other DNA
atgaaaatacaattagttaaaacaaaagataaatgcttatataaatttgatgagtattgttatgcaagtgaacacttaatgaatggaaaagaaattcaaaaaacttttaatgattattggtatgttattgatgaatatccaactttattacagaaaaaagaaactattaaaatcaatgaaagatggactttaaaaaataaagatttgtataacgaaacaattccattagtagtagatgaacattcaaaagataaatataaaaatttggttgaaagcgatttatatgaatatacatatgaagaaaaagaaattttgaaagatatagaattagaaattgaagaaattggtgttattgatgatgacgttccatttgaacataaagaaagaattgaaagttctcatggctggtattcaagaggaaaagaagatgtttatttgataaataaaattaatttttctttaaaagataattgtttaacaccaacaccaattaaagaattaaccaagccatgtgtattatgtaaagattatttatttcaaatattaactgattacataaaaagaaatattgatttaaattatgcaatagtaaaagatgattatacttggagatttagtgtagttacaaataatcaaagacaaatatgtattttatgttggataaatcataataatgataaaacttggactttaaaagatttatatgcaagtaattttaaagaattagttaaaaaaatagaaaaaatggaaaaagaaataattaattatatcaataaagaacatgtgtgtccacattgtaatggaacaggttgtataagtgaaaaatttgatactaataagtggtttagtgaggtgaacaaatga

SEQ ID NO: 615 - DNA, 888 bp, synthetic construct
  misc_feature 1..888: note = GAD1 homologous NA sequence
  source 1..888: mol_type = other DNA
atgaaactgattggtattaaaacaaataactgttttttggtgtctgacaacattcaaggcagcagctatttccatagtcaattagagggattgcttttcgatgggaaacgagcaactgcaacgtataaatcagactggtttaagctagaaaaggaaccaagtgttattgaaaagcaaatgccacctataaaaattaaccatagatatgaattaaaagaaggattccaggaatctgaattaactccaaaagtaattaatgcttcttacataggtgaagaaagtgaatactatgaagtgaagggtttatatgatttgaaatttgaagaagtcccacaacagaatcaaaaaattgagtttgaaatgaatgtaattgaagaaattgacggagaacttaagctacaaagtcataattttaacttgaattataacttactggatagaattcaaactcatccaatgcttcttgaaacaaagccgtgttacttgtcccatgaagaaagctataagattatcagaaaccatataaaagccaatataaaccctaaatttgcaagaatcacgagtgattatgatttctgttttactgtggtcaaggttctggagctttacaaacctcacgagtatgtagttgatcttaatgcaatgtacaaacggagaaagcctaaacttgagaaaagatttcaaacaaagcgggaagttgaaatttacaatgttgcacctaaagcctatcagagatacccaattgtagagccttttagtggtaaagacgttgaggatttgaagagtaatattaagaaatttttatatgatctgatggctaaaatcaacgagcctttagtcgaatgtaaatgctgcaaaggaagaggggttattttaaatgaaaattaa

SEQ ID NO: 616 - DNA, 888 bp, synthetic construct
  misc_feature 1..888: note = GAD1 homologous NA sequence
  source 1..888: mol_type = other DNA
atgaaactgattggtattaaaacaaataactgttttttggtgtctgacaatattgagggtaagagatattttcatagtcaattagatgaattgcttttcgatggggaacgagcaactgaaacgtataagtcagactggtttaagctacataaagagccaagtgttattgaaaagcaaatgccagctaaaaaaatcaatcataggtatgaattaaaagagggattccaggaaactgatctgacaccacaagtaattaatgtttcttacatagatgaagaaagtgaatactacgaagtaaaaggtctatatgatttgaaatttgaagaaatcccacaacaaaatgaaaaaattgagtttgaaatgaacataattgaagagattgacggagaacttaagctgcaaagtcataattttaacttgaattataacttactggatagaattcaaactcatccaatgcttcttgaaacaaagccgtgttacttgtcccgagaagaaagctataagattatcagaaaccatataaaagccaatataaaccctaaatttgcaagaatcacgagtgattatgatttctgtttaactgtggtcaaagttttggagctttacaagcctcacgagtatgtagttgatcttaatgcaatgtacaaacggagaaagcctaaacttgaaaaaagatttcaaacaaagcgagaggttgagatttacaaggttgcacctgaagcctatcagagttacccaattgtagaaccgtttagtggaaaagatgttgaagatttaaagagtaatattaagaattttttagacgatctaatggataaaatcaatgagcctttggtcgaatgcaaatgctgcgaaggaagaggggttatcttaagtgaaaattaa

SEQ ID NO: 617 - DNA, 906 bp, synthetic construct
  misc_feature 1..906: note = GAD1 homologous NA sequence
  source 1..906: mol_type = other DNA
atgaaagaaaatcaaacaaaattaaaactaattgctatcaagacaaaagaaaaagtatttatctcagataacatcgaaaactcttattatcatacttcgcgcattaagcagtatctgtttgatggagtagagccaaaagagacgtatcagaaatcatggtatgaactaaagtcaattcctaataaagtcgaacgtagagtgccacctcaaaggattaatgaaagatatgagttaaaagcagggtttcctgaaagtgaattaactccaaaaatcatcaatgaaaaatatatagacgaagatagtccatatgctgaagtaattggattatatgaaaagaaatttgaactaacagaagaaacttatgaagaaattccatttgagattaatattattgaggaattagatcagtttgaaatcaccaaacaagagtatgagcttaaatataattttcttgatctgctaaatacacaccccgtattactacctacaaaaccatgtaaaatgactcgaaaagatagttttaacatcattagaaaatatattagagaaaatatcgatcaacgttatgcaaaaattgatgcagattatgattttgtatttagagttaagaaaaaaattgaactctatgagccgtttgaatatgaagtgaatttaaatcagggaaccagaagaaagccaaattttgttaaacgttatagaaatacaaaagaaatcacgatattagaaattagtcctgatgttaaaaaggattacgaacctgctacagaatttagtggcgaaaatgaacaggatttgaaaaataaaattaatacatatcttcaggagttgattgcggaaatcaacagaccatatgttgaatgtaaacattgtcaaggttacggagttgttctaaaggaggacaattaa

SEQ ID NO: 618 - DNA, 1059 bp, synthetic construct
  misc_feature 1..1059: note = GAD1 homologous NA sequence
  source 1..1059: mol_type = other DNA
atgaaagaaacattttatcgttttaaaagaggagaactgcaaatgaataacaatacttcaactacgaatttaccacaaatgttatgtataaaaacagataaaggttgttttatatctgattgtcttactgtaaatggttacgattatgagtatcatagaactgaaattgataatcttctgtttgatggtaaaaaagctgtaggagcgcattgtaagaattggtattacattgataaatatccaacacttatccaaagaaaagaatcaggagagagtatcaatagaagatatgagattaaaaatgaatctttgatctcagatagcctaccagctgttattccttatgaagaagccgaaaattatgatagtgatgttgttgatgctttatatttttataagtgggatcaagagccaccacatttaaaagaaataatttatgatattcaagtaatttgtgagatagaaaattataacttccctcctaaaattgaatataagggctttcatcataatcgcagtagttgctctgacgagcgatatattattacaaatgcaaatgttcagcatcaaatgttagacaaaataatatttccagaagtaacacttcatgaatatccttgcaaatttacatctaagcaaatgtacgatattacaagacagtacattattgaacacattgataattcggttgcaaaaattacttccaactacgatttttgttttgaagtaagaaaaattataccaatgattgaacctgaaaccgttacatatacaaatatttttgcaaaaactaaacgtgaaagaaataagatacatacagttataaaagaatacgatgaaaagaaaattttttctatgacacataaaaatgaacaatataaaggttatcctattatacccgagatgtgtgcaaacaacgaagctgagttaaaagaaaaagttgatatgtggttagaaaacttaatcaaactgattaatgaacctttataccagtgtccgcaatgtaagggtcttggttatgttaataacgtttctgagattggttttgattatgaatga

SEQ ID NO: 619 - DNA, 981 bp, synthetic construct
  misc_feature 1..981: note = GAD1 homologous NA sequence
  source 1..981: mol_type = other DNA
atgaaattatacatgataaaaacagatacaagatgttttataactacttgcactccgtcagaatggggaagcacctatgctaaaagttatgaattaaaagaacttttatttgacggtgaacacgcaaaaccaacatatttaccagagtggtacgttatagattcatatcctactaaaatagaaaagaaagaagttgtatatgactatagaaagtatgtattaaaagatgaatataaaggctgttcgggatttaaagaagaaattgaatatgatgatagatttaattttgagtatgagatagattctttttacaattacgaatatcacaaaagagaagtaactcaagaggttgataacttaaaaattgaagttataatggaattagaaaagtttaatttacctacaatagagtatagtgcatacggtgaaacaagtatcaatggattttgggataaagaatattatatcaccaacaaagacgtagagcatcaattaatagataaaatgatgtttccagatatattattatcagaaagaccatgtaaacttacttctaaacaaatgtatgacataactagagcatatataaaagataatatagataataaatatgctagtatatctagtgattttgatttttgttttaaagtagagaaaaaaattaaaaaatatactccagaggaagtaacgtattataatatatttgcgagaactaagaaacaaagaaatacccctcataaaaaaacagttaaatatagaaatgaaactatattcagaatgacaaatagtgttgcgaaatataatgaatatcctattatagaagaaatgactgctaaaaatgaaactgaattaaaagaaaaggttgatacttggttgagtgaattaatagaaaaaataaatgaaccattagtagagtgccctcattgtaacgggttaggtgtgataaatgaaataaaagaaataagttgtaacgatagataa

SEQ ID NO: 620 - DNA, 894 bp, synthetic construct
  misc_feature 1..894: note = GAD1 homologous NA sequence
  source 1..894: mol_type = other DNA
atgaagctaattggtattaaaacaagtaactgttttttggtgtcagacaatattgagggcaagagatattttcatagtcaattagatgaattgcttttcgatgggaaacgagcaactgaaacgtataagtcggactggtttaagcttgaaaaggagccaagtgttattgaaaaacaaatgccagctaaaaaaatcaatcataggtatgaattaaaagagggattccaagaatctgaattaactcctaaagtaattaaagattcttacataggtgaagacagtgaatactatgaagtgaaggggctatatgatttgaaatttgaagaagtcccacaacagaaccaaaaaattgaattcgaaatgaatgtaattgaagaaattgacggagaacttaagctacaaagtcaaaattttaacttgaattataacttactggatagaattcaaactcatccaatgcttcttgaaacaaagccgtgttacttgtcccatgaagaaagctataagattatcagaaaccatataaaagccaatataaaccctaaatttgcaagaatcacgagtgattatgatttctgtttaactgtggtcaaggttctggagctttacaaacctcacgagtatatagttgatcttaatgcaatgtacaaacggagaaagcctaaacttgagaaaaggtttcaaacaaagcgggaagttgaaatttacaatgttgcacctaaagcctatcagagctacccaaacccaattgtagagccttttagtggtaaggacgttgaggatttgaagagtaatattaagaaatttttagatgatctgatggctaaaatcaacgagcctttagtcgaatgtaaatgctgcaaaggaagaggggttattttaaatgaaaattaa

SEQ ID NO: 621 - DNA, 888 bp, synthetic construct
  misc_feature 1..888: note = GAD1 homologous NA sequence
  source 1..888: mol_type = other DNA
atgaagctaattggtattaaaacaagtaactgttttttggtgtcagacaatattgagggcaagagatattttcatagtcaattagatgaattgcttttcgatgggaaacgagcaactgaaacgtataagtcggactggtttaagcttgaaaaggagccaagtgttattgaaaagcaattgccagctaaaaaaatcaatcataggtatgaattaaaagagggattccaagaatctgaattaactcctaaagtaattaaagcttcttacataggtgaagacagtgaatactatgaagtgaaggggctatatgatttgaaatttgaagaaatcccacaacaaaatgaaaaaattgagtttgaaatgaatgtaattgaagaaattgacggagaacttaagctacaaagtcataattttaacttgaattataacttactggatagaattcaaacacatccaatgcttcttgaaacaaagccgtgttacctgtcccaagaagaaagctataagattatcagaaaccatataaaggccaatataaaccctaagtttgcaagaatcacgagtgattatgatttctgtttaactgtggtcaaggttctggagctttacaaacctcacgagtatatagttgatcttaatgcaatgtacaaacggagaaagcctaaacttgagaaaaggtttcaaacaaagcgggaagttgaaatttacaaggttgcacctaaagcctatcagagctacccaattgtagagccttttagcggtaaggacgttgaggatttgaagagtaatattaagaaatttttagatgatctgatggctaaaatcaacgagcctttagtcgaatgtaaatgctgcaaaggaagaggggttattttaaatgaaaattaa

SEQ ID NO: 622 - DNA, 888 bp, synthetic construct
  misc_feature 1..888: note = GAD1 homologous NA sequence
  source 1..888: mol_type = other DNA
atgaagctaattggtattaaaacaagtaactgttttttggtgtctgacaatattaagggcaagagatattttcatagtcaattagatgaattgcttttcgatgggaaacgagcaacccaaacgtataaatcagactggtttaagcttgataaggagccaagtgttattgaaaaacaaatgccagctaaaaaaatcaatcataggtatgaattaaaagagggattccaagaatctgaattaactcctaaagtaattaaagattcttacataggtgaagacagtgaatactatgaagtgaagggtctatatgatttgaaatttgaagaagtcccacaacagaaccaaaaaattgaattcgaaatgaatgtaattgaagaaattgacggagaacttaagctacaaagtcaaaattttaacttgaattataacttactggatagaattcaaactcatccaatgcttcttgaaacaaagccgtgttacttgtcccatgaagaaagctataagattatcagaaaccatataaaagccaatataaaccctaaatttgcaagaatcacgagtgattatgatttctgtttaactgtggtcaaggttctggagctttacaaacctcacgagtatatagtggatcttaatgcaatgtacaaacggagaaagcctaaacttgagaaaaggtttcaaacaaagcgggaagttgaaatttacaatgttgcacctaaagcctatcagagctacccaattgtagagccttttagtggtaaggacgttgaggatttgaagagtaatattaagaaatttttagatgatctgatggctaaaatcaacgagcctttagtcgaatgtaaatgctgcaaaggaagaggggttattttaaatgaaaattaa

SEQ ID NO: 623 - DNA, 888 bp, synthetic construct
  misc_feature 1..888: note = GAD1 homologous NA sequence
  source 1..888: mol_type = other DNA
atgaagctaattggtattaaaacaagtaactgttttttggtgtctgacaatattaagggcaagagatattttcatagtcaattagatgaattgcttttcgatgggaaacgagcaacccaaacgtataaatcagactggtttaagcttgataaggagccaagtgttattgaaaaacaaatgccggctaacaaaatcaattataggtatgaattaaaagagggattccaggaaactgatttgacgccacaagtaattaaaacttcttacataggtgaagacagtgaatactatgaagtgaagggtctatatgatttgaaatttgaagaagtcccacaacagaaccaaaaaattgaattcgaaatgaatgtaattgaagaaattgacggagaacttaagctacaaagtcaaaattttaacttgaattataacttactggatagaattcaaactcatccaatgcttcttgaaacaaagccgtgttacttgtcccatgaagaaagctataagattatcagaaaccatataaaagccaatataaaccctaaatttgcaagaatcacgagtgattatgatttctgtttaactgtggtcaaggttctggagctttacaaacctcacgagtatatagtggatcttaatgcaatgtacaaacggagaaagcctaaacttgagaaaaggtttcaaacaaagcgggaagttgaaatttacaatgttgcacctaaagcctatcagagctacccaattgtagagccttttagtggtaaggacgttgaggatttgaagagtaatattaagaaatttttagatgatctgatggctaaaatcaacgagcctttagtcgaatgtaaatgctgcaaaggaagaggggttattttaaatgaaaattaa

SEQ ID NO: 624 - DNA, 888 bp, synthetic construct
  misc_feature 1..888: note = GAD1 homologous NA sequence
  source 1..888: mol_type = other DNA
atgaagctaattggtattaaaacaagtaactgttttttggtgtctgacaatattgaaggaaagaaatattttcatagtcaattagatgaattgtttttcgatgggaaacgagcaactgaaacgtataaatcagactggtttaagcttgataaggagccaagtgttattgaaaaacaaatgcctgctaaaaaaatcaatcaaaggtatgaattaaaagaggggttccaggaaactgatttgacgccacaagtaattaaaacttcttacataggtgaagacagtgaatactatgaagtgaagggtttatatgatttaaaatttgaagaagtcccgcaacagaatcaaaaaattgagtttgaaatgaatgtaattgaagaaattgacggagaacttaagttgcaaagccataattttaacttgaattataacttactagatagaattcaaactcatccaatgcttcttgaaacaaagccgtgttacttgtcccgagaagaaagctataagattatcagagaccatattaaagccaatattaaccctaaattggcaagaatcacgagtgattatgatttctgtttaactgtggtcaaagttttggagctttacaaacctcaagagtacgtagttgatctaaatgcaatgtacaaacgtagaaaacctaaacttgagaaaagatttcaaacaaagcgggaggttgaaatttacaatgttgcacccaaagcctatcagagctatccaattgtagagccttttagtggtaatgacgttgaagatttaaagagtaatattaagaaatttttagatgatctgatgactaaaatcaatgagcccttagtcgaatgtgaatgctgcaaaggaagaggggttattttgaatgaaaattaa

SEQ ID NO: 625 - DNA, 888 bp, synthetic construct
  misc_feature 1..888: note = GAD1 homologous NA sequence
  source 1..888: mol_type = other DNA
atgaagctaattggtattaaaacaagtaactgttttttggtgtctgacaatattgaaggaaagaaatattttcatagtcaattagatgaattgtttttcgatgggaaacgagcaactgaaacgtataaatcagactggtttaagcttgataaggagccaagtgttattgaaaaacaaatgcctgctaaaaaaatcaatcataggtatgaattaaaagaggggttccaggaaactgatttgacgccacaagtaattaaaacttcttacataggtgaagacagtgaatactatgaagtgaagggtctatataatttaaaatttgaagaagtcccgcaacagaatcaaaaaattgagtttgaaatgaatgtaattgaagaaattgacggagaacttaagttgcaaagccataattttaacttgaattataacttactggatagaattcaaactcatccaatgcttcttgaaacaaagccgtgttacttgtcccgagaagaaagctataagattatcagaaaccatataaaagccaatataaaccctaagtttgcaagaatcacgagtgattatgatttctgtttaactgtggtcaaagttttggagctttgcaaacctcaagagtacgtagttgatctaaatacaatgtacaaacgtagaaagcctaaacttgagaaaagatttcaaacaaagcgggaagttgaaatttacaatgttgcacctaaagcctatcagagctacccaattgtagaaccgtttagtggcaaagatgttgaggatttaaagggcaatattaagaaatttctagatgatctaatggataaaattaatgagcctttagtcgaatgtaaatgctgcgaaggaagaggggttatcttaagtgaaaattaa

SEQ ID NO: 626 - DNA, 731 bp, synthetic construct
  misc_feature 1..731: note = GAD1 homologous NA sequence
  source 1..731: mol_type = other DNA
atgaagctaattggtattaaaacaagtaactgttttttggtgtctgacaatattgaaggaaagaaatattttcatagtcaattagatgaattgtttttcgatgggaaacgagcaactgaaacgtataaatcagactggtttaagcttgataaggagccaagtgttattgaaaaacaaatgcctgctaaaaaaatcaatcataggtatgaattaaaagaggggttccaggaaactgatttgacgccacaagtaattaaaacttcttacataggtgaagacagtgaatactatgaagtgaagggtctatatgatttaaaatttgaagaagtcccgcaacagaatcaaaaaattgagtttgaaatgaatgtaattgaagaaattgacggagaacttaagttgcaaagccataattttaacttgaattataacttactggatagaattcaaactcatccaatgcttcttgaaacaaagccgtgttacttgtcccgagaagaaagctataagattatcagaaaccatataaaagccaatataaaccctaagtttgcaagaatcacgagtgattatgatttctgtttaactgtggtcaaagttttggagctttacaaacctcaagagtacgtagttgatctaaatgcaatgtacaaacgtagaaagcctaaacttgagaaaagatttcaaacaaagcgggaggttgaaatttacaatgttgcccccaaagcctatca

SEQ ID NO: 627 - DNA, 888 bp, synthetic construct
  misc_feature 1..888: note = GAD1 homologous NA sequence
  source 1..888: mol_type = other DNA
atgaagctaattggtattaaaacaagtaactgttttttggtgtctgacaatattgaaggaaagaaatattttcatagtcaattagatgaattgtttttcgatgggaaacgagcaactgaaacgtataaatcagactggtttaagcttgataaggagccaagtgttattgaaaagcaaatgcctgctaaaaaaatcaatcataggtatgaattaaaagaggggttccaggaaactgatttgacgccacaagtaattaaaacttcttacataggtgaagacagtgaatactatgaagtgaagggtctatatgatttaaaatttgaagaagtcccgcaacagaatcaaaaaattgagtttgaaatgaatgtaattgaagaaattgacggagaacttaagttgcaaagccataattttaacttgaattataacttactggatagaattcaaactcatccaatgcttcttgaaacaaagccgtgttacttgtcccgagaagaaagctataagattatcagaaaccatataaaagccaatataaaccctaagtttgcaagaataacgagtgattatgatttctgtttaactgtggtcaaagttttggagctttacaaacctcaagagtacgtagttgatctaaatgcaatgtacaaacgtagaaagcctaaacttgagaaaagatttcaaaccaagcgggaggttgaaatttacaatgttgcacccaaagcctatcagagctatccaattgtagagccttttagtggtaaggacgttgaagatttaaagagtaatattaagaaatttttagatgatctgatgactaaaatcaacgagcccttagtcgaatgtgaatgctgcaaaggaagaggggttattttgaatgaaaattaa

SEQ ID NO: 628 - DNA, 888 bp, synthetic construct
  misc_feature 1..888: note = GAD1 homologous NA sequence
  source 1..888: mol_type = other DNA
atgaagctaattggtattaaaacaagtaactgttttttggtgtctgacaatattgaaggaaataaatattttcatagtcaattagatgaattgtttttcgatgggaaacgagcaacccaaacgtataaatcagactggtttaagcttgataaggagccaagtgttattgaaaaacaaatgccggctaaaaaaatcaattataggtatgaattaaaagagggattccaggaaactgatttgacgccacaagtaattaaaacttcttacataggtgaagacagtgaatactatgaagtgaagggtctatatgatttaaaatttgaagaaatcccgcaagagaatcaaaaaattgagtttgaaatgaatgtaattgaagaaattgacggagaacttaagctgcaaagtcataattttaacttgaattataacttactggatagaattcaaactcatccaatgcttcttgaaacaaagccgtgctacttgtcccgagaagaaagctataagattatcagaaaccatataaaagccaatataaaccctaaatttgcaagaatcacgagtgattatgatttctgtttaactgtggtcaaggttctggagctttacaaacctcacgagtatatagttgatcttaatgcaatgtacaaacggagaaagcctaaacttgagaaaagatttcaaacaaagcgggaagttgaaatttacaatgttgcacctaaagcctatcagagctacccaattgtagaaccgtttagtggaaagggcgttgaagatttaaagagtaatattaagaaatttttagatgatctgatggctaaaatcaacgagcctttagttgaatgtaaatgctgcaaaggaagaggagttattttaaatgaaaattaa

SEQ ID NO: 629 - DNA, 888 bp, synthetic construct
  misc_feature 1..888: note = GAD1 homologous NA sequence
  source 1..888: mol_type = other DNA
atgaagctaattggtattaaaacaagtaactgttttttggtgtctgacaatattgaaggaaataaatattttcatagtcaattagatgaattgtttttcgatgggaaacgagcaacccaaacgtataaatcagactggtttaagcttgataaggagccaagtgttattgaaaaacaaatgccggctaaaaaaatcaattataggtatgaattaaaagagggattccaggaaactgatttgacgccacaagtaattaaaacttcttacataggtgaagacagtgaatactatgaagtgaagggtctatatgatttaaaatttgaagaagtcccgcaagagaatcaaaaaattgagtttgaaatgaatgtaattgaagaaattgacggagaacttaagttgcaaagccataattttaacttgaattataacttactggataggattcaaactcatccaatgcttcttgaaacaaagccgtgttacttgtcccgagaagaaagttataagattatcagaaaccatattaaagccaatattaaccctaaattggcaagaatcacgagtgattatgatttctgtttaactgtggtcaaagttttggagctttacaaacctcacgagtatgtagttgatcttaatgcaatgtacaaacgaagaaagcctaaacttgagaaaagatttcaaacaaagcgggaagttgaaatttacaatgttgcacctaaagcctatcagagctacccaattgtagagccttttagtggtaaggacgttgaggatttgaagagtaatattaagaaatttttagatgatctgatggctaaaatcaacgagcctttagtcgaatgtgaatgctgcaaaggaagaggggttattttgaatgaaaattaa

SEQ ID NO: 630 - DNA, 888 bp, synthetic construct
  misc_feature 1..888: note = GAD1 homologous NA sequence
  source 1..888: mol_type = other DNA
atgaagctaattggtattaaaacaagtaactgttttttggtgtctgacaatattgagggcaagaaatattttcatagtcaattagatgaattgctttttgatgggaaacgagcagctgaaacgtatatgtcagactggtttaagctagataaggagccaagtgttattgaaaagcaaatgccagctaaaaaaatcaatcataggtatgaattaaaagagggattccaggaaactgatttgacaccacaagtaattaatgtttcttacatagatgaagaaagtgaatactacgaagtaaaaggtctatatgatttgaaatttgaagaaatcccacaagtaaatgaaaaaattgagtttgaaatgaatgtaattgaagaaattgacggagaacttaagctacaaagtcataattttaacttgaattataacttactggatagaattcaaacacatccaatgcttcttgaaacaaagccgtgttacctgtcccaagaagaaagctataagattatcagaaaacatataaaagccaatataaaccctaagtttgcaagaatcacaagtgattatgatttctgtttaactgtggtcaaagttttggagctttacaaacctcacgagtatgtagtagatcttaatgcaatgtacaaacggagaaagcctaaacttgagaaaagacttcaaacaaagcgggaagttgaaatttacaatgttgcacctaaagcctatcagagctacccaattgtagaaccgtttagtggaaaggacgttgaagatttaaagagtaatattaagaaatttttagatgatctgatggctaaaatcaacgagcctttagttgaatgtaaatgctgcaaaggaagaggggttattttaaatgaaaattaa

SEQ ID NO: 631 - DNA, 213 bp, synthetic construct
  misc_feature 1..213: note = GAD1 homologous NA sequence
  source 1..213: mol_type = other DNA
atgaagctaattggtattaaaacaagtaactgttttttggtgtctgacaatattgagggcaagaaatattttcatagtcaattagatgaattgctttttgatgggaaacgagcagctgaaacgtatatgtcagactggtttaagctagataaggagccaagtgttattgaaaagcaaatgccagctaaaaaatcaatcataggtatgaattaa

SEQ ID NO: 632 - DNA, 888 bp, synthetic construct
  misc_feature 1..888: note = GAD1 homologous NA sequence
  source 1..888: mol_type = other DNA
atgaagctaattggtattaaaacaagtaactgttttttggtgtctgacaatattgagggcaagagatattttcatagtcaattagatgaattgcttttcgatgggaaacgagcaactgaaacgtataagtcagactggtttaagttagataaggagccaagggtcattgaaaggcaaatgccagctaaaaaaatcaatcataggtatgaattaaaagagggattccaggaaactgatttaacaccacaagtaattaatgtttcttacatagatgaagaaagtgaatactacgaagtaaaaggtctatatgatttgaaatttgaagaagtcccacaacaaaatgaaaaaattgagtttgaaatgaacgtaattgaagaaattgatggagaacttaagctacaaagtcataattttaacttgaattataacttactggatagaattcaaacacatccaatgcttcttgaaacaaagccgtgttacctgtcccgagaagaaagctataagattatcagaaaccatataaaagccaatataaaccctaagtttgcaagaatcacgagtgattatgatttctgtttaactgtggtcaaagttttggagctttacaaacctcacgagtatgtagtggatcttaatgcaatgtacaaacggagaaagcctaaacttgagaaaagatttcaaacaaagagggaagttgaaatttacaatgttgcacctaaagcctatcagagctacccaattgtagagccttttagtggtaaggacgttgaagatttaaagagtaatattaagaaatttttagatgatctgatggctaaaatcaacgagcctttagttgaatgtaaatgctgcaaagggagaggagttattttaaatgaaaattaa

SEQ ID NO: 633 - DNA, 888 bp, synthetic construct
  misc_feature 1..888: note = GAD1 homologous NA sequence
  source 1..888: mol_type = other DNA
atgaagctaattggtattaaaactaataactgttttttggtttctgacaacattgaagacaagagatattttcatagtcaattagatgaattgcttttcgatgggaaacaagcagctaaaacgtataagtcagactggtttaagctggataaggaaccaagtgttattgaaaagcaaatgccaactaaaaaaatcaatcataggtatgaattaaaagagggattccaggaaactgatctgacaccacaagtaattaatgtttcatacatagatgaagaaagtgaatactacgaagtaaaaggtctatatgatttgaaatttgaagaagtcccacaacaaaatgaaaaaattgagtttgaaatgaacgtaattgaagagattgacggagaacttaagctgcaaagtcataattttaacttgaattataacttactggatagaattcaaactcatccaatgcttcttgaaacaaagccgtgtcacctgtcccgagaagaaagctataagattatcagaaaccatataaaagccaatataaaccctaaacttgcaagagtcacgagtgattatgatttctgttttactgtggtcaaagttttggagctttacaaacctcacgagtatatagttgatcttaatgcaatgtacaaacggagaaagcctaaacttgagaaaagatttcaaacaaagcgggaagttgaaatttacaatgttgcacctaaagcctatcagagctacccaattgtagaaccgtttagtggaaaggacgttgaagatttaaagagtaatattaagaaatttttagatgatctgatggccaaaatcaacgagcctttagtcgaatgtgaatgctgcaaaggaagaggggttattttgaatgaatattaa

SEQ ID NO: 634 - DNA, 933 bp, synthetic construct
  misc_feature 1..933: note = GAD1 homologous NA sequence
  source 1..933: mol_type = other DNA
atgaagctacaaacaataaaatgctcagatggatatttcctaaaggacgcagtgggccttcgctttggaaaagaggatgtgactgccacctggaaccgtgagtggttcaaggtctcttccgttgagggacggcaagtttaccgggtgacactcgcgacgcagcgactatcgggctactcgcttaagccggaatttgttgcaacagatgctatgccctcgagcgttggtgtcgatttcttcgcatactcggacgacaaacaaaacaacgcccatttacgtggcctctacgaaccgacctacgaacctgtcccggaaaaagcagagcccatagagatagagttggaaatcatcgcgacggttgatggcgaacttgtgcaaaaagccatgaattttccagtgtacggaacctactcgcacgaaggaaagcgctggtcagtcaccgagcagagcattcaagtcagtctcctcgaccgaataacagcaccgtcactgctacatcaggaagtcccgtgtcagttgtcttctgaagatagcttcaaaattattcgtacgcacgtaaaagacaacatcgaccccaaggtggctgcaatcacgagtgactacgatttctgcctcactgtccaaaagaaaatcaaactagcagagccagaaccatatacgcgggatgcgaatttcagttttttcggccgcaggcggaagccgcgcatggtcacggactatcgcacggagcgaaagttggtggtctatgaaacagcgcccctaagaggaggtgaggtgtacaagggatataccaagactgagccgttcacaggtcacaacgttcaagagttgaaacagaacatcgaagcgtacctgaaggaattgatggcggagataaataagccgctcgtggactgtccgaattgcaaaggccacggggtaatgactgcctag

SEQ ID NO: 635 - DNA, 897 bp, synthetic construct
  misc_feature 1..897: note = GAD1 homologous NA sequence
  source 1..897: mol_type = other DNA
atgaagctgattggtattaaaacaaataactgttttttggtgtctgacaacattcaaggcgagacatactttcgtagtcagttagaaggttatctgtttgatggagaaaaggctgagaaaacttataaatcagactggtttaaattagataaacaaccaaaaacgattgaaaagaaattggcagctaaaagaattaattatagatacgaattgaaagagcaatttcaagaaacagaattaacgcccaaagttatcaatgtttcttatatagatgaaggtagtgaattttatgaagtaaagggtctatatgatttgaaatttgaccaagagcctcaaaagaatgaaaaagttgatttcgaattaaatgtacttgaagaatttgatggagaattaaaactagggaaacaggaatttaatttgaagtataacttattagataaaattcaaacacatccgatgatgcttgaaacaaagccttgctacctgtcacacaaagaaagttataacattatcagaaatcatgttaatgcaaacataaatcctaaatatgcaagaatcacttctgattatgatttttgtttaactgttaacaaagtggttgagctttacgaacatgaagaatacgttgttgacttaaatcgtatgtataaacgcaggaagccaaagctagaaaaaaggctgcgaacaaaaaaagaagcaatcatttatgaagttgcaccaaaagcttatcaaaattacccgattgttgaaccgttctgtggagaaaatgttgaggacatgaaaaataacattaaagtttttttagatgaactaatggcaaatatcaacgagcccttaattgaatgtaaacattgcaaaggaagaggggtagtctctaatgaaaatcctattggatag

SEQ ID NO: 636 - DNA, 888 bp, synthetic construct
  misc_feature 1..888: note = GAD1 homologous NA sequence
  source 1..888: mol_type = other DNA
atgaagctgattggtattaaaacaaataactgttttttggtgtctgacaatgttcaaggtagtagctattttcatagtcaattagaaggattgcttttcgatggggaacgagcaactgcaacgtataaatcagactggtttaagctggtgaaggagccaagtgttattgaaaagcgaatgccggctaaaaaaattaatcatagatatgaattgaaagaggggttccaggaatctgaattaactccaaaagtaatttatgcttcttacataggtgaagacaatgaatactatgaagtgaagggtctatatgaattgaaatttgaagaagtcccacaacagaatcaaaagattgagtttgaaatgaacattattgaagaagttaacggggaacttaagatgcaaagtcaaaatttcaacttgaaatataacctactggatagaattcaaacgcatccaatgcttcttgaaacaaagccgtgttacttgtctcgagcggaaagctataaaattattagaaaccatattaaagccaatataaaccctaaatttgcaagaatcacaagtgattatgatttttgttttactgtggtaaaggttttggaactttacaagcctcacgagtatgtagttgatcttaatgcaatgtacaaacggagaaagcctaaacttgaaaaaagatttcaaacaaagcgagaggttgagatttacaaggttgcacctgaagcctatcagagttacccaattgtagaaccgtttagtggaaaagatgttgaagatttaaagagtaatattaagaattttttagacgatctaatggataaaatcaatgagcctttggtcgaatgcaaatgctgcgaaggaagaggggttatcttaagtgaaaattaa

SEQ ID NO: 637 - DNA, 981 bp, synthetic construct
  misc_feature 1..981: note = GAD1 homologous NA sequence
  source 1..981: mol_type = other DNA
atgaagttatacatgataaaaacaaatacaaaatgttttataactacttgtactccagaagaatggggtgaaacttatgctaaaagttatggattaaaagaacttttatttgacggtaaatatgcgaaaccgacatatttaccagaatggtatgttatagatttatatcctgccaaaatagaaaagaaaggagttgtatacgattatagaaagtatgtattaaaagatgaatataaaggttgtttaggatttaaagaagaaatcgactatgacaatagatttaaatttgaacatgaaatagattctttttataattatgaatatcaaaaaagagaagtgaatcaagaagtcaacgatttagaaattgaagttataatagaattagaaaattttaatttacctacaatagaatacaaagcatatggtgcaaccaatatgaatgcatattgggatggggaatacaatattactaataaaggggtaagacatcaattaatagataaaatgatgtttccagatatattattaccagaaagaccatgtaaatttacttctaaacaaatgtatgatataaccagagcgtatataaaagataacataaataataaatatgctacgatatctagtgattacgatttttgttttgaagtaaaaaagaaaattaaaaaatatactccagaagaagtaacatattataatatatttgcaaaaactaagaaacaaagaaatacacctcataaaaaaatagttaaatatagagaggaaactatatttaaaatgacaaatagtaagtctaaatatgatgggtatcctattatagaagaaatgactgctaaaaatgaaactgaattgaaagaaaaggttgatacttggttaagtgaattaataaaaaaaataaatgaaccattagtagagtgccctcattgtaatggattgggcgtgataagtgaaataaaagaaataaattgcaatgatagataa

SEQ ID NO: 638 - DNA, 981 bp, synthetic construct
  misc_feature 1..981: note = GAD1 homologous NA sequence
  source 1..981: mol_type = other DNA
atgaagttatacatgataaaaacaaatacaaaatgttttataactacttgtactccagaagaatggggtgaaacttatgctaaaagttatggattaaaagaacttttatttgacggtaaatatgcgaaaccgacatatttaccagaatggtatgttatagatttatatcctgccaaaatagaaaagaaaggagttgtgtacgattatagaaagtatgtattaaaagatgaatataaaggttgtttaggatttaaagaagaaatcgactatgacaatagatttaaatttgaacatgaaatagattctttttataattatgaatatcaaaaaagagaagtgaatcaagaagtcaacgatttagaaattgaagttataatagaattagaaaattttaatttacctacaatagaatacaaagcatatggtgcaaccaatatgaatgcatattgggatggggaatacaatattactaataaaggggtaagacatcaattaatagataaaatgatgtttccagatatattattaccagaaagaccatgtaaatttacttctaaacaaatgtatgatataaccagagcgtatataaaagataacataaataataaatatgctacgatatctagtgattacgatttttgttttgaagtaaaaaagaaaattaaaaaatatactccagaagaagtaacatattataatatatttgcaaaaactaagaaacaaagaaatacacctcataaaaaaatagttaaatatagagaggaaactatatttaaaatgacaaatagtaagtctaaatatgatgggtatcctattatagaagaaatgactgctaaaaatgaaactgaattgaaagaaaaggttgatacttggttaagtgaattaataaaaaaaataaatgaaccattagtagagtgccctcattgtaatggattgggcgtgataagtgaaataaaagaaataaattgcaatgatagataa

SEQ ID NO: 639 - DNA, 981 bp, synthetic construct
  misc_feature 1..981: note = GAD1 homologous NA sequence
  source 1..981: mol_type = other DNA
atgaagttatacatgataaagacaaacacaaaatgttttataactacttgtactccagaagaatggggtagtacttatgctaaaagcagagggttaaaagaacttttatttgacggtgaatatgcaaaaccgacatatttaccagagtggtatgttatagattcatatcctaccaaaatagaaaagaaaggagttgtatacgattatagaaagtatgtattaaaagatgaatataaaggttgtttaggatttaaagaagaagtcgactataacgatagatttaattttgaacatgatatagattctttttataattatgaatatcaaaaaagagaagtgaatcaagaagttgataatttagaaattgaagttataatggaattagaaaattttaatttacctacaatagaatacaaagcatatggtgcaaccaatatgaatgcatattgggatggggaatacaatattactaataaaggggtaagacatcaattaatagataaaatgatgtttccagatatattattaccagaaagaccatgtaaatttacttctaaacaaatgtatgatataaccagagcgtatataaaagataacataaataataaatatgctacgatatctagtgattacaatttttgttttgaagtaaaaaagaaaattaaaaaatatactccagaagaagtaacatattataatatatttgcaagaactaagaaacaaagaaatacacctcataaaaaaatagttaaatatagagaggaaactatatttaaaatgacaaatagtaagtctaaatatgatgggtatcctattatagaagaaatgactgctaaaaatgaaaccgaattaaaagaaaaggttgatacttggttaagtaatttaattgaaaaaataaatgagccattagtagaatgtcctcattgtaatggattgggtgtgataagtgaaataaaagaaataaattgtaatgatagataa

SEQ ID NO: 640 - DNA, 1017 bp, synthetic construct
  misc_feature 1..1017: note = GAD1 homologous NA sequence
  source 1..1017: mol_type = other DNA
atgaataacaatacttcaactacgaatttaccacaaatgttatgtataaaaacagataaaggttgttttatatctgattgtcttactgtaaatggttacgattatgagtatcatagaactgaaattgataatcttctgtttgatggtaaaaaagctgtaggagcgcattgtaagaattggtattacattgataaatatccaacacttatccaaagaaaagaatcaggagagagtatcaatagaagatatgagattaaaaatgaatctttgatctcagatagcctaccagctgttattccttatgaagaagccgaaaattatgatagtgatgttgttgatgctttatatttttataagtgggatcaagagccaccacatttaaaagaaataatttatgatattcaagtaatttgtgagatagaaaattataacttccctcctaaaattgaatataagggctttcatcataatcgcagtagttgctctgacgagcgatatattattacaaatgcaaatgttcagcatcaaatgttagacaaaataatatttccagaagtaacacttcatgaatatccttgcaaatttacatctaagcaaatgtacgatattacaagacagtacattattgaacacattgataattcggttgcaaaaattacttccaactacgatttttgttttgaagtaagaaaaattataccaatgattgaacctgaaaccgttacatatacaaatatttttgcaaaaactaaacgtgaaagaaataagatacatacagttataaaagaatacgatgaaaagaaaattttttctatgacacataaaaatgaacaatataaaggttatcctattatacccgagatgtgtgcaaacaacgaagctgagttaaaagaaaaagttgatatgtggttagaaaacttaatcaaactgattaatgaacctttataccagtgtccgcaatgtaagggtcttggttatgttaataacgtttctgagattggttttgattatgaatga

SEQ ID NO: 641 - DNA, 1017 bp, synthetic construct
  misc_feature 1..1017: note = GAD1 homologous NA sequence
  source 1..1017: mol_type = other DNA
atgaataacaatacttcaactacgaatttaccacaaatgttatgtataaaaacagataaatgttgttttatatctgattgtcttactgtaaatggttacgattatgagtatcatagaactgaaattgataatcttctgtttgatggcaaaaaagctgtaggagcgcattgtaagaattggtattacattgataaatatccaacacttattcaaagaaaagaaccgggagagagtatcaatagaagatatgagattaaaaacgcatctttgatttcagatagcttgccagctgttattccttatgaagaagccgaaaattatgatagtgatgttgttgatgctttatatttttataagtgggatcaagagccaccacatttaaaagaaataatttatgatattcaagtaatttgtgagatagaaaattataattttcctcctaaaattgaatataagggttttcatcgtaatcacagtagttattctgacgagcaatatattattacaaatgcaaatgttcagcatcaaatgttagacaaaataatatttccagaagtaacacttcatgaatatccttgcaaatttacatctaagcaaatgtacgatattacaagacagtacattattgaacacattgataattcggttgcaaaaattgcgtataattatgattcttttgttgaagtaagaaaaattataccaataattgaacctgaaaccgttacatatacaaatatttttgcaaaaactaaacgtgaaagaaataagatacatacagttataaaagaatacgatgaaaagaaaattttttctatgacacataaaaatgaacaatataaagattatcctattatacccgaaatgtgtgcaaacagcgaaactgaattaaaagaaaaggttgatatgtggttagaaaacctaatcaaatttatcaatgaacctttgtgtcagtgtccacaatgtaagggtcttggttatgttaataacgtttctgagattggttttgattatgaatga

SEQ ID NO: 642 - DNA, 984 bp, synthetic construct
  misc_feature 1..984: note = GAD1 homologous NA sequence
  source 1..984: mol_type = other DNA
atgaatatttatatggtaaaaacaaataaagaatgctttatatctgattgtaaggttttttcgggaagtgattatgaatatcacagaactcaattaactaatctatattttgatggagagaaaccaaaagaaacatactgtaaaaattggtatgttatagataaatacccagaaaaaattgaaactgaatcaatagagtatacaaatgaaagatatgaaattaataataaaaatcttatatgtgaaaagttccctgaaacaataaaaaaagaagatagaggcaaatttaattttgatataactgagttttatacttttaaaagagataaacttcctcttagattagttgaagcggaaaatgtgaatgtagaaataattattgaattggatagttttaaaatgccaaataaaatagaatatgatattgtttgtgacaaagaacattataaaaataattctgcatataaaataacaaatgcaaatgtaaaacaccagtttttagataagatgatttttccagaaataatgttatcatcaagaccatgcaaattaacatctaaacaaatgtatgatataacaagaaaatatataaaagacaatatagatttaagcaaggctaaaatcacatctgattataaattttgttttgctgttaaaaaaataataccattattaacgccagaaaaaataagttacacaaatatatttgcaagaacaaaaaaagaacgcaataaaattcatcatgaaattaaagaatataaagaagtagagatattctctatgactcataaacaagaaaattacggtggatatactgcaatagatgagctatgtgcgaataatgaaaatgaactaaaagaaaaagttgatacatggttaaaaggagttgtagatataatcaataagccattaactcaatgtgagcattgtaatgggacaggatatatagatgaaattaaaaaaatagaattaaatcaaaattag

SEQ ID NO: 643 - DNA, 984 bp, synthetic construct
  misc_feature 1..984: note = GAD1 homologous NA sequence
  source 1..984: mol_type = other DNA
atgaatatttatatggtaaaaacaaataaagaatgctttatatctgattgtaaggttttttcgggaagtgattatgaatatcacagaactcaattaactaatctatattttgatggagagaaaccaaaagaaacatactgtaaaaattggtatgttatagataaatacccagaaaaaattgaaactgaatcaatagagtatacaaatgaaagatatgaaattaataataaaaatcttatatgtgaaaagttccctgaaacaataaaaaaagaagatagaggcaaatttaattttgatatatctgagttttatacttttaaaagagataaacttcctcttagattagttgaagtggaaaatgtgaatgtagaaataattattgaattagatagttttaaaatgccaaataaaatagaatatgatattgtttgtgacaaagaacattataaaaataattctgcatataaaataacaaatgcaaatgtaaaacaccagtttttagataagatgatttttccagaaataatgttatcatcaagaccatgcaaattaacatctaaacaaatgtatgatataacaagaaaatatataaaagacaatatagatttaagcaaggctaaaatcacatctgattataaattttgttttgctgttaaaaaaataataccattattaacgccagaaaaaataagttgcacaaatatatttgcaagaacaaaaaaagaacgcaataaaattcatcatgaaattaaagaatataaagaagtagagatattctctatgactcataaacaagaaaattacggtggatatactgcaatagatgagctatgtgcgaataatgaaaatgaactaaaagaaaaagttgatacatggttaaaaggagttatagatataatcaataagccattaactcaatgtgagcattgtaatgggacaggatatatagatgaaattaaaaaaatagaattaaatcaaaattag

SEQ ID NO: 644 - DNA, 1047 bp, synthetic construct
  misc_feature 1..1047: note = GAD1 homologous NA sequence
  source 1..1047: mol_type = other DNA
atgacaacaaataaattaagtattgtcgcatataatacagataaaggtctttattacgcaaacaatcaacgtgactacaataaacaacgagtttctatttacagtggtattttggtgaatggtggacaacctgtagatagtgaacataaaagtggttggtatttcttgaaaggtgaagataaaattacatctgtcaaaaagaaccaatctggtgggtatggcgaagcttcttggaagttacttgatgactccacacatatcgatggtgttattcctaaagtattgacacctactgaagctgatgagtttgaagatgactgtgaatggtatatcggtcaaggtagtaagtattatgcttatcgtgggctatataaacgtgtacaagagcgcttacctaatattgaggttgatgtggaatttgaagtagattacaaaggtcacattgaatatgccttagtagagaataactataaggatatgaagattcgtgtatctaacggaagctcttggacacctaaagtgatggagcaaagccttacctctataacacactactacgaacttgaggaattacttacgcctgatatagtactacacaaccgaccatgttatatcacacaagatactacatacaacattgtacgtaattatatcaaggaaaatattaaccctaaacatgcaaggcttacatctgactacgacttttgccttaccgttaagaaggtaatacacattaaacctttcactaagagtacagagattacaaaaagtaacggacgtagttatgctaaaccacaattcaaaacacaaacaattagcaccaaagaagtagaaatatttgaaatgtgtccaagtaagaagtatcagaactacacacctattgaagggtttaaaggtaacagtcttgcagatttagttgaaaatatgaagttatatttagaccatcttatgggagttatcaacactcctgtagaagaatgtacttcttgtggtggactaggttgtacttacaacaaaattgatgatattaatatcagaggagagtaa

SEQ ID NO: 645 - DNA, 975 bp, synthetic construct
  misc_feature 1..975: note = GAD1 homologous NA sequence
  source 1..975: mol_type = other DNA
atgagtaacgcattacaaataagcattattaaaaccgacgctggtaaatgcttcataacagattgctccgccaaggatggttatcattataactaccatcaatcaagaatagccgatctgtactttgacggtgaaaaggccagcaagacgtttcataaaaactggcttgagttgaaaggttatccagagaagattgagcggttgatttctggcgagaaaaccaatctccgctacgagcttaaagaccctgatcttgagagcgtgaagtatcctctaactcttgcatatgacgatagagattcaatcgatgaagaaatcaggtcatcactctactcattcagtttcgatgttgttccggactaccttgtaaaggttgatgcggatttagtgcttatgtgtgaagtagaaaacttccgtgaagcaccagacttcaactacccagcagttaagcgcgtacagtttagtgaagagccatacagaataaccaacatcaacattgcgcactctctcgtggattgcctgataattcctgagccgcttagagccagtagcccgtgcgaaatttcatcaaaggaaatgtatgaccttgtccggcagcatattaaggacaacatcaaaacatcactagctcgcattacaagtgattatgacttctgctttacggtgaagaaaatcattcctctgcttgagcctcatacatattcatatcaggacatttttgccagaaccaaaaagcaacgagcaaagcttcacttcaaaactgcgacatctaaagaaattgagattttccagatgacgcatgagcaaagcaattacaaaggttacacggccatcaaaggattcaaggccagcaatgaatgggagcttaaggagatgattgataatttccttgcgacgctcatggataccattcacgcaccaatagagcaatgctcatgctgtggcggtacaggctacatgcaagacatcaaatag

SEQ ID NO: 646 - DNA, 975 bp, synthetic construct
  misc_feature 1..975: note = GAD1 homologous NA sequence
  source 1..975: mol_type = other DNA
atgagtaacgcattgcaaataagcattattaaaaccgacgctggtaaatgttttatcactgattgcacagcaaaggacggttatcactaccagtaccatcaatctaaaattgctgatctcctatttgacggagttaaacccaaagccagctttcacaaaaactggtttgaaattgaacattaccctgaaaaggttgagagaattatctctggtgaaagaattaatgttcgctacgagcttaaagatgctgaacttgagagtaaaaaataccctttgacacttagttacaatgagcgtgacgcagtggacgaggatatcagaggctctctttatgaatacaaatacgatactgcacctgattacacctctccagttgacgctgaattcacattagtatgtgaggttgaaaattttcgtgacgcaccagaatttaattactctgcaattaggcatgttgggttccgggaggagaggtacgttgtaaaaaacataaacgtaaaacactctcttgttgactgcatcataattcctgagcctttgcgggctaacagcccttgtgaaatttcatcaaaagaaatgtatgacattgtacgccagcacgtaaaagataacatcgacaacaaactggctagaataacaagtgattacgcattttgctttaccgttaaaaaaataataccgctccttaagcctcacacatattcatatcaggatatttttgccagaaccaagaagcaaagagcaaagttgcactttaagactgacacggtgaaagaaattgaaattttccaaatgacacatgaccaagaaaattacaaaggttatacggcgattaaagggttcaaagccaataacgaatgggagctaaaggaaatgattgataacttccttacgacgcttatggataccattcacgcgccaatagagcaatgctcatgctgttgcggtacaggctacacgcaagacatcaaatag

SEQ ID NO: 647 - DNA, 975 bp, synthetic construct
  misc_feature 1..975: note = GAD1 homologous NA sequence
  source 1..975: mol_type = other DNA
atgagtaacgcattgcaaataagcattattaaaaccgacgctggtaaatgttttatcactgattgcacagcaaaggacggttatcactaccagtaccatcaatctaaaattgctgatctcctatttgacggagttaaacccaaagccagctttcacaaaaactggtttgaaattgaacattaccctgaaaaggttgagagaattatctctggtgaaagaattaatgttcgctacgagcttaaagatgctgaacttgagagtaaaaaataccctttgacacttagttacaatgagcgtgacgcagtggacgaggatatcagaggctctctttatgaatacaaatacgatactgcacctgattacacctctccagttgacgttgaattcacattagtatgtgaggttgaaaattttcgtgacgcaccagaatttaattactctgcaattaggcaggttgagttccgggaggagaggtacgttgtaaaaaacataaacgtaaaacactctcttgttgactgcatcataattcctgagcctttgcgggctaacagcccttgtgaaatttcatcaaaagaaatgtatgacattgtacgccagcacgtaaaagataacatcgacaacaaactggctagaataacaagtgattacgcattttgctttaccgttaaaaaaataataccgctccttaagcctcacacatattcatatcaggatatttttgccagaaccaagaagcaaagagcaaagttgcactttaagactgacacggtgaaggaaattgaaattttccaaatgacacatgaccaagaaaattacaaaggttatacggcgattaaagggttcaaagccaataacgaatgggagctaaaggaaatgattgataacttccttacgacgcttatggataccattcacgcgccaatagagcaatgctcatgctgtggcggtacaggctacacgcaagacatcaaatag

SEQ ID NO: 648 - DNA, 432 bp, synthetic construct
  misc_feature 1..432: note = GAD1 homologous NA sequence
  source 1..432: mol_type = other DNA
atgcttcttgaaacaaagccgtgttacttgtcccgagaagaaagctataagattatcagaaaccatataaaagccaatataaaccctaagtttgcaagaatcacgagtgattatgatttctgtttaactgtggtcaaagttttggagctttacaaacctcaagagtacgtagttgatctaaatgcaatgtacaaacgtagaaagcctaaacttgagaaaagatttcaaacaaagcgggaggttgaaatttacaatgttgcccccaaagcctatcagagctatccaattgtagagccttttagtggtaaggacgttgaagatttaaagagtaatattaagaaatttttagatgatctgatgactaaaatcaacgagcccttagtcgaatgtgaatgctgcaaaggaagaggggttattttgaatgaaaattaa

SEQ ID NO: 649 - DNA, 981 bp, synthetic construct
  misc_feature 1..981: note = GAD1 homologous NA sequence
  source 1..981: mol_type = other DNA
atggaaaataaaaaagcattacagataagcattattaaaactaacattggcaagtgctttattaccgactgcaatgtaaccagtggctattcgttcgactatcataatacacaaattgataagcttttatttgatgggcacaaagctacagaaacatttgcgaaaaactggtttgaaataccaacatatccagaaaaagtagaggcactaatcactggtgaaaaacaaaacagacgttttaaattgaaagataaagagcttcaaagcacaaaattaccattggaaattccatacgatgaacggaatgtatttgatgaagatgtgctatattctctttattctctaacttatgacgttgtacctgattacttagttcttattgatgttaattttaatttgatttgtgaagttgataatttcagagaaacaccagaatttaattatccagcagttaggaaatatgacttctcagatcaacaatattctgtaataaatcaaaatatcaaacactctcttatagatagcattatcgttcctgctccattattagccagcagtccatgtaaaatatcatcaaaagagatgtatgatcttgttcgtcagcatgttaaagataatataaatccaaaacttgccagaataactagtgattatgatttctgctttgaagttaaaaagataatacctttacttgagccttgtactttctcttaccgagatatgtttgccagaacaaaaaaacagagaggaaaaatacattttaaaacagcaacatctaaagaaataactatttatgagatgacgcataaccagaggaattataatggttatacacctattaaagaattttctgcaagcaatgaatgggaattaaaagagatgatcgataatttcttatcagagttgatggatgtcattcatgcaccaatcgaagagtgtccacattgcaacggaactggttatctacaaaacgaagaatag

SEQ ID NO: 650 - DNA, 981 bp, synthetic construct
  misc_feature 1..981: note = GAD1 homologous NA sequence
  source 1..981: mol_type = other DNA
atggaaagtaagccgatagaaattgaaattataaaaacagatgctggtcagtgtttcataaccgactgtacagcaaccaatggttattactttaataatcatgaaacaattttagatgaacttctgtttgatggtatgagtccagttaaaacattccatacccactggtactcgattgaaaaattcccatcaaaagtagaggagataatttcaggtgagacggaaaacgagagatatgaactaaaggatcctgaactggcaagcgataaattaccaagggaaatagcgattggtgacagtgataattatgatgaagacattatagactcactttactcactaaagcatgacgttaagcctgattactctgttgaggttgacgttaagtttaacatcatttgcgaagtggaaaactttaaaaaagcgcctgagtttaattaccctgcaattaaaagagttggcttttcagatgagatgtattcagtgacaaatcaaaacgtaaaacattccctaatagattgcatcatcacacctgaacctgttcgctcaaatagcccatgcaaaatatcatcaaaggaaatgtatgatttggttcgccagcatatcatcaataacattgacacaaagatagcaagaatcacaagtgattatgacttctgctttgaagttaaaaaaatcatccctttacttaaacctcacacttattcgtataaagatgtattcgcaaggacaaaaaaacaaagagaaaagctgcactttaaaaaagatgtagctaaagaagtttcaatttatgaaatgacacacgaacaagaaaattacaaaggctacacgccaattaagtcattctctgcaagtaacgagtgggaattaaaagaaatgattgataactacttatctgaagttatgcaaattatccatgctccattgagaatttgtgaatgctgcgatggaactgggtatctacaaaacgaaaacaattag

SEQ ID NO: 651 - DNA, 981 bp, synthetic construct
  misc_feature 1..981: note = GAD1 homologous NA sequence
  source 1..981: mol_type = other DNA
atggaaagtaagccgatagaaattgaaattataaaaacagatgctggtcagtgtttcataaccgactgtacagcaaccaatggttattactttaataatcatgaaacaattttagatgaacttctgtttgatggtatgagtccagttaaaacattccatacccactggtactcgattgaaaaattcccatcaaaagtagaggagataatttcaggtgagacggaaaacgagagatatgaactaaaggatcctgaactggcaagcgataaattaccaagggaaatagcgattggtgacagtgataattatgatgaagacattatagactcactttactcactaaagtatgacgttaagcctgattactctgttgaggttgacgttaagtttaacatcatttgcgaagtggaaaactttaaaaaagcgcctgagtttaattaccctgcaattaaaagagttggcttttcagatgagatgtattcagtgacaaatcaaaacgtaaaacattccctaatagattgcatcatcacacctgaacctgttcgctcaaatagcccatgcaaaatatcatcaaaggaaatgtatgatttggttcgccagcatatcatcaataacattgacacaaagatagcaagaatcacaagtgattatgacttctgctttgaagttaaaaaaatcatccctttacttaaacctcacacttattcgtataaagatgtattcgcaaggacaaaaaaacaaagagaaaagctgcactttaaaaaagatgtagctaaagaagtttcaatttatgaaatgacacacgaacaagaaaattacaaaggctacacgccaattaagtcattctctgcaagtaacgagtgggaattaaaagaaatgattgataactacttatctgaagttatgcaaattatccatgctccattgagaatttgtgaatgctgcgatggaactgggtatctacaaaacgaaaacaactag

SEQ ID NO: 652 - DNA, 978 bp, synthetic construct
  misc_feature 1..978: note = GAD1 homologous NA sequence
  source 1..978: mol_type = other DNA
atggaagataaaaaagtattacaaataaacatcattaaaacaaatgtcggtaagtgctttattaccgactgcaacgagatcaatggttataattttaattaccataaaacacaaatagacaagcttttatttgatggtcataaacccaaagaaacatttgcgagatgttggtttgaaataccaatatatccaaaaaaagtagaaatattaattactggcgaaagaaaaaataaacgatttaaattaaaagatgatgaacttcaaagttcaaaatttccattggaaatacctctcaatgagaggaatgaatttgatgaagatatgttgacttctctttattttctggcgtatgacatcgctccagattatttaaaacaaattaatgtttattttaatttaatatgcgaagttgataactttaaagatgcacccgaatttaactatccagcggttaggaaatacgacttctcagaacagcaatacagcgtaacaaatcaaaatataaagcattctctaatagattgcattgtcgttccagctccattgcgagctaatagtccgtgtgaaatatcatcaaaagagatgtatgatcttgttcggcagcacgttagagataatataaatccaaaacttgcaagaataagtagcgactttggtttttgttttgaggttaaaaaaataatacccatactcgagcctcatatatattcttatcatgatgtttttgctagaactaaaaagcaaagagaaaagctacatttcaagacagcaaaatctaaagaaatatccatttaccaaatgactcacgcacaagagaactataagggatatacagccatcaaggggttttctgcaagtaacgagtgggaattaaaagaaatgatcgataatttcttatcagagttgatgaacactattcacacaccgattgaacaatgttctcattgcaatggaactggatatctacaaaacaaataa

SEQ ID NO: 653 - DNA, 981 bp, synthetic construct
  misc_feature 1..981: note = GAD1 homologous NA sequence
  source 1..981: mol_type = other DNA
atggaagataaaaaagtgttacaaataaacatcattaaaactaacattgggaagtgttttattaccgactgcaatgagactagtggttataatttcgactatcatacaacacaagtagataagcttttatttgatggtcacgaacctaaacggtcatttacgaaaaactggtttgaaataccgtcatatccagaaaaagtagaaaggttgattactggtgaaagacaaaataagcgctttaaattaaaagatgaagagcttaaaagttcaaaattaccactagaaattccatatggagatagtgatgaacttgataaatctatactagattctctttattctctgacttatgacatagttccaaattatttaatgccaattaatgttgagtttaatttggtatgtgaagttgataactttaaagatgcccctgaatttaactatccagcggttagaaaatacgatttttcagaacaacaatacagcgtaacaaatcagaacataaagcattctctcatagatcgcattatcgttcctgccccattacgagccaacagcccgtgcgagatatcatcaaaagagatgtatgatcttgttcgtcagcacgttaaggataatataaatccagagcttgctagaataactagtgattatgatttctgttttgaggttaaaaagataatacccttactcgaaccttatacacactcttatcgcgatatttttgccagaactaaaaagcaaagacagaagctgcatttcaaaacagtaaaatcaaaagaaatatccatttacgaaatgactcacgaacaacagaactacaagggctatacagccatcaagggtttctctgcaagtaatgagtgggaactaaaagaaatgattgataatttcttatcggagttgatgagcactatcaatgcaccgattgaacagtgtcctcattgcaacggaacgggctatctgcaaaacgaaaagtag

SEQ ID NO: 654 - DNA, 975 bp, synthetic construct
  misc_feature 1..975: note = GAD1 homologous NA sequence
  source 1..975: mol_type = other DNA
atggataagaaattgcagataagcatcattaaaacagatgcgggaaagtgctttatcactgactgcaaagcaagcagtggataccattacaattaccacaattcgtctatcgagggtctaatatttgatggattggctgcaaaacctaccttccataaaaattggtacgagataccttcttaccctgaaaaaatagagcgcctgattaccggacagaaaacaaatcgacgctatgaattgaaggatgctgatttaagcagtgaaaaatacccgcttatcgtctcatatgatgacagggattctatcgatgaagacctgctgcattcgctatacacgctcaagtcagacgatgttcctgattaccttcaagaggtcgagtgtgggctagaccttatctgcgaggtagataactaccgtgatgcccctgagtttagctacccaggaatcaggcgcgtacagttcagtgatgaaaaatacaccatttcaaatcaaaacattaagcactcacttattgactgcatcatccttcctgagccattaagagccaatagtgcctgcgaaatatcatccaaggaaatgtttgatctcgttcgccagcatgttaaggacaatatccaaagtggctttgcaaggataactagtgattacgacttctgtttcactgttaagaaaataatcccgctgctcaagccgcacacgtactcatatcaggacatatttgccagaacgaagaaacagcgggctaaattgcattttaaaacggatacgtcaaaggaaattgagatattccaaatgacgcatgaccgagagaactacaagggatatacaccaatcaaggggtttaaagcagataacgagtgggaacttaaagagctgattgacagcttcctgtcaactctcatggaaaccattcactcaccaattgagcagtgctcatgctgtaacggtactggatacatgcaggatatcaaatag

SEQ ID NO: 655 - DNA, 975 bp, synthetic construct
  misc_feature 1..975: note = GAD1 homologous NA sequence
  source 1..975: mol_type = other DNA
atggataagaaattgcagataagcatcattaaaacagatgcgggaaagtgctttatcactgactgcaaagcaagcagtggataccattacaattaccacaattcgtctatcgagggtctaatatttgatggattggctgcaaaacctaccttccataaaaattggtacgagataccttcttaccctgaaaaaatagagcgcctgattaccggacagaaaacaaatcgacgctatgaattgaaggatgctgatttaagcagtgaaaaatacccgcttatcgtctcatatgatgacagggattctatcgatgaagacctgctgcattcgctatacacgctcaagtcagacgatgttcctgattactttcaagaggtcgagtgtgggctagaccttatctgcgaggtagataactaccgtgatgcccctgagtttagctacccaggaatcaggcgcgtacagttcagtgatgaaaaatacaccatttcaaatcaaaacattaagcactcacttattgactgcatcatccttcctgagccattaagagccaatagtgcctgcgaaatatcatccaaggaaatgtttgatctcgttcgccagcatgttaaggacaacatccaaagtggctttgcaaggataactagtgattacgacttctgtttcactgttaagaaaataatcccgctgctcaagccgcacacgtactcatatcaggacatatttgccagaacgaagaaacagcgggctaaattgcattttaaaacggatacgtcaaaggaaattgagatattccaaatgacgcatgaccgagagaactacaagggatatacaccaatcaaggggtttaaagcagataacgagtgggaacttaaagagctgattgacagcttcctgtcaactctcatggaaaccattcactcaccaattgagcagtgctcatgctgtaacggtactggatacatgcaggatatcaaatag

SEQ ID NO: 656 - DNA, 858 bp, synthetic construct
  misc_feature 1..858: note = GAD1 homologous NA sequence
  source 1..858: mol_type = other DNA
atggtaaattttacaataataagtacagttaatggtagtatgttcattaaagatgatagaagttatggaagtaatattcctgattatttctttgatggcgagaaactagaagcaactaagaaagataagtggtttaaaataagtaaaactccaacaacagttcaaaagaaagggagtgataaacagactaatagacgatatgaactaaaagcaggttatccaatttcagatttaaccccacaaataattgcttatgatgaatttgatagtgacgatgaaatagcagggctttacgtgtttaaatatgacacagttgagggaatactagaagatattgagtttgaaatagaaatactagcagaagaagagaatttttatgttgagaaacctaaatttccaggaactcctttactaatgtcagaattaacttcacatcctgatcttattgacaataagccttgtaaaattggatcaaaagaactgtacgaagttactagggaatatataaaagctaatattgatagtaaatatgcaagagttacgagtgattatgatttttgtctatctgtaactaaaaatattggtattgatcctgagccttactatgtaactggcgggacaaaaagaaaaccaacaaaagaattgagatataaaagaataagagatgtaaaagcatatgaaacgtctccagaaggttattctagctacccaactattcaaccaatttcggcaagaaacagaaaagagttagatgataaaattcaagcatttttagaagaattaataattgatattaataaaccatatgtagagtgtgaatgctgtaaaggtatgggtgtaattttaaaggaagaatag

SEQ ID NO: 657 - DNA, 912 bp, synthetic construct
  misc_feature 1..912: note = GAD1 homologous NA sequence
  source 1..912: mol_type = other DNA
atgtacgataaagaaaatccactaaaacttaaagtaattaactgtaaaaattatatttatatagcaaatgaagattattatggaactaaagacttaacacaatttcaatttgatggtgaaacaccagaaaaaacaaataaagatagatggtttaaacttatgagtattcctaaagttgtgtctgcgaagcaagaagacaagcgtattaatgttagatatgagttaaaagcaggatatacagcaacggaactaatgccacaaatcattacacaagaaatggaacagagtgaagaatatgatgaagtaattggactgtataactataaatacgatactattccaggcgaatatgaaccaattgaatttgaaattaaagaaatttacgcaagagaagattttgaatttatacagaatgtatatgacgctgaatccagcttgcttacacaaattgaatatccagaagaagcatatcaagataaaccatgtaaaattgattccaaaagaatgctacagattatcagaaattatgtaaaagcaaacatagataccagtgttgcaactattacgtctgattatgatttccattttgaagtaaagaaaaagattccattggcagatccatataatattttagttgataaaaataattcattgtttaataagagaagaaaaccacaatgggtgaataaaatggtttctgagaagtcatcaacaattataaatttaaaagataataaaacatcttctgattatggtaatgattgtgtcgtagctccatctattatcgggaaaaattatcaggatttacaaaataaaatagaaaagtatttatcagaacttatggaacaaattaataaaaagtattgtgaatgtcctacttgtaaaggttggggaattgtagaaggagaataa

SEQ ID NO: 658 - DNA, 912 bp, synthetic construct
  misc_feature 1..912: note = GAD1 homologous NA sequence
  source 1..912: mol_type = other DNA
atgtacgataaagaaaatccactaaaatttaaagtaattaactgtaaaaactatatttatatagcaaatgaagattattatggcactaaagatttaacacgatttcgatttgatggtgaaatgccagaaaaaacaaataaagataaatggtttaaacttatgagtattcctaaagttgtgtctatgaagcaacaagacaagcgtattaatattaggtatgaactgaaagcaggatatacagcaacagaactcatgccacaaattattacacaagaaatggaagatagtggtgaatatgaagaggtaatgggattgtattcatataaatatgacacgattccaggtgagtatgaacctattgaatttgaaattaaagaaatttacacaagagaagattttgagtttgttcccaataaatataatgcaaaaacagatttgctcacacagattgaatatccagaagaagcatatcaagataaaccttgcaaactagattgtgatgaaatgttaaagattataagaaattatgttaaagcaaatattgatactaatgttgctgacatcacatctgattatgattttcattttgaagtaaaaaagaaaatcgcattagctgatccatacaatattttaattgatacaaataataatctattcagtaaaagaaaaagaaaacctaattgggttaatcgtatgatttcacataaaacagaaacgattattgattttaaaaattcaacatctacagattatggaaaagattgtgtaaaagctccatgtattatcggagaaaattatcaagatttacaaaagaaagtagagaaatttttaacagaacttatatcacagatcaataaaaagtattgtgaatgccctacttgcaaaggttggggaattgtagaaggagaataa

SEQ ID NO: 659 - DNA, 912 bp, synthetic construct
  misc_feature 1..912: note = GAD1 homologous NA sequence
  source 1..912: mol_type = other DNA
atgtataaatcaaatgattcaactttaaaattggtagcgattaagactaaaagtaaaatattaatctcagataatatcaacggtgaaaactacttccatacgagattagataactatttttatgatggagaaaaacctactaaaacctaccataaagattggtttgaatttaaacaaatgccaactaaaattgaaaaacaattaccagcaaaaagaattaatgaaagatatgaactcaaagaggggttcagtgaaactgaattaacacctaaagttattaataaatcatacatagatgaagatagtgatttttatgaagtaaaaggattatacgatttcaaatatgaaacacaggaagctggttttgaagaaattccttttgaaattacaatcgctgaagaaattgatggcgagtttgaaattgtaaaaatggaacatgaacctaaatatagtttattggacagaattacaactcatcctgttttactccaaacaaagccttgttatctaacaaaagaagaatcatacagaattattcgtaatcatgtaaagtcaaatattaattctaaatatgcaagagtaacgagtgactatgacttttatttcactgttgagaaggtaatagaactgtatgaaccacattcgtatgaagttaatgtaaatgctgcttactctagacgtaaaccaaaatatgaaaaaagataccaaagaaatagaactcaaaaaatctatgaggtagcaccaaagccatacaatagctatccagttgtcgaaccgtttacagggaaggattacacagatttgaaaaataatatcgatacttttttacataatttaatggaaatgatcaatgaacctgtagttgaatgtaagcattgtaaaggaagaggggttgttttaaatgaaaattaa

SEQ ID NO: 660 - DNA, 912 bp, synthetic construct
  misc_feature 1..912: note = GAD1 homologous NA sequence
  source 1..912: mol_type = other DNA
atgtatagtaaagaaaatccattaaaactgaaagtgatcaattgtaaaaattatatctacatagcaaatgaaaattactatggagttacagacttaactagatatctatttgatggtgaagtaccagaaaaaacaaataaagatagatggtttaaacttaatagtattcctaaagttgtagcagcaaagcaagaggataaacgtattaatgttaggtatgaactgaaagcaggatatactgcaacagaactcatgccacagattatcacacaagaaatggaacaaagtgaagaatacgatgaagtaattggattatataactataagtatgacactattccaggagaatatgaaccaattgaatttgaaattaaagaaatttactcaagagaaaattttgagtttgttcccaataaatataatgcaaaaacagatttactcacacaaattgaatatccagaagaagcatatcaagacaaaccttgcaaactagattgtgatgaaatgttaaagattataagaaattatgttaaagcaaatattgatactaatgttgctgatatcacatctgattatgattttcattttgaagtaaaaaagaaaatcgcattggctgatccatacaatattttaattgatacaaataataatctattcagtaaaagaaaaagaaagcctaagtgggttaatcgtatgatttcacataaaacagaaacgattattgattttaaaaattcaacatctacagattttggaaaagattgtgtaaaagctccatctattatcggagaaaattatcaagatttacaaaataaagtagataaatttttaacagagcttatgtcgcagattaacaaaaaatattgtgaatgccctacttgcaaaggttggggaattatagaaggagaataa

SEQ ID NO: 661 - DNA, 912 bp, synthetic construct
  misc_feature 1..912: note = GAD1 homologous NA sequence
  source 1..912: mol_type = other DNA
atgtatagtaaagaaaatccattaaaacttaaagtaattaactgtaaaaactatatttacatagcaaatgaagattactttggagttacagacttaactagatacttatttgatggtgaagtaccagagaaaacaaataaagatagatggtttaaacttaatagtattcctaaagttgtagcagcaaagcaagaagataaacgtattaatgttagatatgaactgaaagcaggatatacagccacagaactcatgccacaaattatcacaaaagaaatggaacaaagtgaagaatacgatgaagtaattggattatataactataagtatgacactattccaggagaatatgaaccaattgaatttgaaattaaagaaatttattcaagagaaaattttgagtttgtgcaaaatatatatggagcagaaaccagtttgcttacacaaattgaatatccagaagaagcatatcaagataaaccatgtaagattgattcaaaaataatgttgcagattatcagaaattatgtaaaagcaaatattgataccagtgttgcaactattacatctgattatgagtttcattttgaagtaaagaaaaagattccattagcagatccatataatattttagtagataaaaataattcattgtttaataaaagaagaaaaccacaatgggtaaataaaatgatttctgaaaaatcagaaacaattatcaatttaaaagatgatagtaaatcttctgattatggtaatgattgtgtggtcgctccatctattatcggagaaaattatcaagatttacaaaataaagtagagaaatttttaacagagcttatatcacaaattaacaaaaaatattgtgaatgccctacttgcaaaggttggggaattgtagaaggagaataa

SEQ ID NO: 662 - DNA, 915 bp, synthetic construct
  misc_feature 1..915: note = GAD1 homologous NA sequence
  source 1..915: mol_type = other DNA
atgtatagtaaagaaaatccattaaaacttaaagtaattaactgtaaaaactatatttacatagcaaatgaagattattatggagttacagacttaactagatacttatttgatggtgaagtaccagagaaaacaaataaagatagatggtttaaacttaatagcattcctaaagttgtatctgcaaaacaagaagataaacgtattaatgtcagatatgaactgaaagcaggatatacagcaacagaacttatgccacaaattattacacaagaaatgaaacagagtgaagaatatgatgaagtaattggattatataactataagtatgacacgattccaggtgaatatgaacctattgagtttgaaattaaagaaatttacgcaagaaaagattttgaatttgttcctaacaaatatcatgcgaaaacagatttaatcacacaaattgaatatccagaagaagcctatcaggataaaccttgtaaattagattctgatgaaatgctacaaattattagaaattatgttaaagcaaatattgatactaatgtagctgatattacatccgattatgattttcattttgaagtagttaagaaaattgtattagctgatccatataatattttggttgatacaaataatagtttgttcaataaaagaaagagaaaacctaattgggttaatcgtatgatttctcagaaaaaggaaaccattattaattttaaaaatgcttcaacaagtacagattatggtaaagattgtgtggtagctccatcaatcgttggagaaaattataaagatttacaaaataaagtggagaaatttttaacagagcttatgtcacagattaataaaaagtattgtgaatgccctacttgtaaaggttggggaattgtagaaggagaataa

SEQ ID NO: 663 - DNA, 912 bp, synthetic construct
  misc_feature 1..912: note = GAD1 homologous NA sequence
  source 1..912: mol_type = other DNA
atgtatagtaaagaaaatccattaaaacttaaagtaattaactgtaaaaactatatttacatagcaaatgaagattattttggagttaaagacttaactagatacttatttgatggtgaagtaccagagaaaaccaataaagatagatggtttaaacttaataatattcctaaagttatagccgcaaaacaagaagataaacgcattaatattaggtatgaactgaaagcaggatatacagcaacagaactcatgccacagattattacacaagaaatgaaacagagtgaagaatacgatgaagtaattggattgtataattataagtacgatactattccaggagaatatgaaccaattgaatttgaaattaaagaaatttacgcaagagaagattttgagtttgttcccaatgaatataatgcaaaaacagatttactcacgcagatcgaatatccagaagaagcatatcaagacaaaccttgtaaactagattgtgatgaaatgttaaagattataagaaattatgttaaagcaaatattgatactaatgttgccgacatcacatctgattatgattttcattttgaagtaaaaaagaaaattgcattggctgatccatacaatattttaattgatacaaataataatctatttagcaaaagaaaaagaaaacctaagtgggttaatcgtatgatttcacataaaacagaaacgattattgattttaaaaattcaacatctatagattatggaaaagattgtgtaaaagctccatctattatcggagaaaattatcaagatttacaaaataaagtagagagatacttatcagaacttatgactcagattaataaaaaatattgtgaatgtcctacttgcaaaggttggggaattatagaaggagaataa

SEQ ID NO: 664 - DNA, 912 bp, synthetic construct
  misc_feature 1..912: note = GAD1 homologous NA sequence
  source 1..912: mol_type = other DNA
atgtatagtaaagaaaatccattaaaacttaaagtaattaactgtaaaaactatatttacatagcaaatgaagattattttggagttaaagacttaactagatacttatttgatggtgaagtaccagagaaaaccaataaagatagatggtttaaacttaatagtattcctaaagttatagccgcaaaacaagaagataaacgcattaatattaggtatgaactgaaagcaggatatacagcaacagaactcatgccacagattattacacaagaaatgaaacagagtgaagaatacgatgaagtaattggattgtataattataagtacgatactattccaggagaatatgaaccaattgaatttgaaattaaagaaatttacgcaagagaagattttgagtttgttcccaatgaatataatgcaaaaacagatttactcacgcagatcgaatatccagaagaagcatatcaagacaaaccttgtaaactagattgtgatgaaatgttaaagattataagaaattatgttaaagcaaatattgatactaatgttgccgacatcacatctgattatgattttcattttgaagtaaaaaagaaaattgcattggctgatccatacaatattttaattgatacaaataataatctatttagcaaaagaaaaagaaaacctaagtgggttaatcgtatgatttcacataaaacagaaacgattattgattttaaaaattcaacatctatagattatggaaaagattgtgtaaaagctccatctattatcggagaaaattatcaagatttacaaaataaagtagagagatacttatcagaacttatgactcagattaataaaaaatattgtgaatgtcctacttgcaaaggttggggaattatagaaggagaataa

SEQ ID NO: 665 - DNA, 912 bp, synthetic construct
  misc_feature 1..912: note = GAD1 homologous NA sequence
  source 1..912: mol_type = other DNA
atgtatagtaaagaaaatctattaaaacttaaagtaattaactgtaaaaactatatttacatagcagatgaagattattatggagttacagacttaactagatacttatttgatggtgaagtaccagagaaaacaaataaagatagatggtttaaacttaatagtattcctaaagttgtagcagcaaagcaagaagataaacgtattaatgttaggtatgaactgaaagcaggatatactgcaacagaactcatgccacagattatcacacaagaaatggaacaaagtgaagaatacgatgaagtaattgaattatataactataagtatgacactattccaggagaatatgaaccaattgaatttgaaattaaagaaatttactcaagagaaaattttgagtttgttcccaataaatataatgcaaaaacagatttactcacacaaattgaatatccagaagaagcatatcaagacaaaccttgcaaactagattgtgatgaaatgttaaagattataagaaattatgttaaagcaaatattgatactaatgttgctgatatcacatctgattatgattttcattttgaagtaaagaagaaaatcgcattggctgatccatacaatattttaattgatacaaataataatctattcagtaaaagaaaaagaaagcctaagtgggttaatcgtatgatttcacataaaacagaaacgattattgattttaaaaattcaacatctacagattttggaaaagattgtgtaaaagctccatctattatcggagaaaattatcaagatttacaaaataaagtagagaaatttttaacagagcttatgtcacagattaacaaaaaatattgtgaatgccctacttgtaaaggttggggaattgtagaaggagaataa

SEQ ID NO: 666 - DNA, 912 bp, synthetic construct
  misc_feature 1..912: note = GAD1 homologous NA sequence
  source 1..912: mol_type = other DNA
atgtatagtaaagaaaatctattaaaacttaaagtaattaactgtaaaaactatatttacatagcagatgaagattattatggagttacagacttaactagatacttatttgatggtgaagtaccagagaaaacaaataaagatagatggtttaaacttaatagtattcctaaagttgtagcagcaaagcaagaagataaacgtattaatgttaggtatgaactgaaagcaggatatactgcaacagaactcatgccacagattatcacacaagaaatggaacaaagtgaagaatacgatgaagtaattggattatataactataagtatgacactattccaggagaatatgaaccaattgaatttgaaattaaagaaatttactcaagagaaaattttgagtttgttcccaataaatataatgcaaaaacagatttactcacacaaattgaatatccagaagaagcatatcaagacaaaccttgcaaactagattgtgatgaaatgttaaagattataagaaattatgttaaagcaaatattgatactaatgttgctgatatcacatctgattatgattttcattttgaagtaaagaagaaaatcgcattggctgatccatacaatattttaattgatacaaataataatctattcagtaaaagaaaaagaaagcctaagtgggttaatcgtatgatttcacataaaacagaaacgattattgattttaaaaattcaacatctacagattttggaaaagattgtgtaaaagctccatctattatcggagaaaattatcaagatttacaaaataaagtagagaaatttttaacagagcttatgtcacagattaacaaaaaatattgtgaatgccctacttgtaaaggttggggaattgtagaaggagaataa

SEQ ID NO: 667 - DNA, 894 bp, synthetic construct
  misc_feature 1..894: note = GAD1 homologous NA sequence
  source 1..894: mol_type = other DNA
gtgatattgattaaatttaaagtaattgactgtaaaaattacatctatatctcgaagggtgatagatggaattgtgattgcagcaaatatttatttgatggtaaggtagcagagcctacaaataaaacagaatggtatagattagataagattccaactgtcgtgtcagaaaagagacctgatgaacacattaataagagatacgaattaaaagctggatataccgcaaatgatttaatgccaaaggttatcaatgaagaccatacagatgaatatgaggaagtaattggtttatatacatataagtatgattcagttccaggtggttatgaggatattgagtttagcattgagaaaatttataagagagaagattttacatttgttcctaataaatatagtgctgaaactgatttaattacacagattgaatatccagaagaagcatttcaagataagccttgtagaattgattcttctcgtatgctaaaacttatcagagaatatgtaaaagcacacattgacacttctgttgcatctattaaatctgattatgatttccatttccaagtagtaaagaaaattgctttggctgatccatatagtatcagagtagatacaaataattcctttatgaataaaagaaggaaacctaaatgggtagatagaatgatttcaactaaagagacaactattattaattttaaggacaaagcttcttctagtgattatggagatgactgtagaattgctccatcaattgaaggtgaaaactatgtggatttgcaaaataaagtggagaattatttattagaacttatgaaacagattaacaaaaattattgcgaatgtcctaactgtaaaggttggggaattgtggaggcagaagagtaa

SEQ ID NO: 668 - DNA, 888 bp, synthetic construct
  misc_feature 1..888: note = GAD1 homologous NA sequence
  source 1..888: mol_type = other DNA
ttgaagctaattggtattaaaacaaataactgttttttggtgtctgacaacattcaaggcgagacatactttcatagtcaattaaaaggattgctttttgatggtaaaccagcaactgcaacgtataagtcagactggtttaagctcaaaaaggagccaagtgttattgaaaagcaaatgccggctaaaaaaattaatcatagatatgaattgaaagaagggttccaggaatctgaattaactccaaaagtaatttatgcttcttacataggtgaagacaatgaatactatgaagtgaagggtctatatgaattgaaatttgaagaagttccacaacagaatcaaaagattgagtttgaaatgaacattattgaagaagttaacggggaacttaagattcaaagtcaaaatttcaacttgaaatataacctactggatagaattcaaacgcatccaatgcttcttgaaacaaagccgtgttacttgtctcgggcggaaagctataaaattattagaaaccatattaaagccaatataaaccctaaatttgcaagaatcacaagtgattatgatttctgttttactgtggtaaaggttttggaactttacatgcctcacgagtatgtagttgatcttaatgcaatgtacaaacggagaaagcctaaacttgaaaaaagatttcaaacaaagcgagaggttgagatttacaaggttgcacctgaagcctatcagagttatccaattgtagaaccgtttagtggaaaagatgttgaagatttaaagagtaatattaagaaatttttagatgatctgatggctaaaattaacgagcctttagtcgaatgcaaatgctgcaaaggaagaggggttattttaaatgaaaattaa

SEQ ID NO: 669 - DNA, 903 bp, synthetic construct
  misc_feature 1..903: note = GAD1 homologous NA sequence
  source 1..903: mol_type = other DNA
ttgaatagaggaaaagcaccggcaagcgaaagtctaaaattgattgccataaaaactaaatctaaagtctatgtttctgataatatcaataatgattcatatttttattctagaattaaagatctaatttttgatggatcaaaacctgaaaatacatataagagtgactggtttgaggttccttgtgtgccaacaacgattcaaagaagtcttccagcagaacaaatcaatgtacggtacgaacttaaggaagtacactacaatacgggtttgccaaaggtactacagtattctgattttgatgaggatactggtcaatatgagtctgtatatgggttatatgaacggaaattcgatttgactgaaccaggattggaaaatgttgaatttgaactaaatgtaattgctgagttagaagattttgaaatcgtaagaagcgactttcagttgcagcactcaatcctagatcatattacaactcatcctattcttctctcaacaaaaccttgcaaattatcccgacaagagagctttaatatcgtaagaaaatatataaaagctaatatagatagtaagtatgcatctgttacaagtgattatgatttttgtctttctgtttctaagaagattgaacatgctccagaatcatatcgagtagacgttggaaagcgaaaaccgaaatacgaaacaagatatagccgttctcgaactgttaaggtttatgaaactgcccccaaatcataccagacatatccggtaattgagccatttgaaggaaagaatgaagatgatttaaaagatattatccaaaaattcttggatgaattaatgattgtaatcaataaaccattagttgaatgcgaacactgtaaaggatatggagtgattttagatgaagtttaa

SEQ ID NO: 670 - DNA, 885 bp, synthetic construct
  misc_feature 1..885: note = GAD1 homologous NA sequence
  source 1..885: mol_type = other DNA
ttgaattttaaaattatagattgtattgattatatttatatttctaaaaatgaaagatataactcagctattgataatttactttttgatggagaaagagcagaaataacaaataaaaattattggtacaaattaccccacatccccaaaagtgtaactgttaaaaagtcaaatgaacaaataaacaaaaggtatgaattaaaatctggttacgctgccacggaattgatgccacaaatcattacgatggaaatgtacaacacagatgagtatgacgagataattggttgttattcattaaaatatgacgaagtagatggcggttatgaagatatagaatttaccattgataaaatttatacaaagaaggactttgagtttgttccaaatacatattgtgcaaatgtaggattattaacagaaattgaatacccagaagaagtttatcaggatatgccttgcaaattagattctaagcaagttttcgatttgattagagaacatgttaaagccaatattaatacgtctattgcaaaagtgacctctgattatgattttcactttgaagtaacaagaaatataggacttgctaatccttatacaaaaatggtagacacaaacaattcttggataaataaaagaagaaaaccaaagtgggttgaaagaatggtgtctgataaatctgtacccatattaaacatcaagactcctggttcaaatgattatggaaaagattgtgttgtcccttctccaattacaggtgaaaattacaaagatttagaaacaaaagttaagacttatttggaagagattattaagagtattaataaaaaatattgtgaatgccctcaatgtcaaggttggggagttgtggaggttgaataa

SEQ ID NO: 671 - DNA, 567 bp, synthetic construct
  misc_feature 1..567: note = GAD1 homologous NA sequence
  source 1..567: mol_type = other DNA
ttgacaccacaagtaattaatgtttcttacatagatgaagaaagtgaatactacgaagtaaaaggtctatatgatttgaaatttgaagaaatcccacaagtaaatgaaaaaattgagtttgaaatgaatgtaattgaagaaattgacggagaacttaagctacaaagtcataattttaacttgaattataacttactggatagaattcaaacacatccaatgcttcttgaaacaaagccgtgttacctgtcccaagaagaaagctataagattatcagaaaacatataaaagccaatataaaccctaagtttgcaagaatcacaagtgattatgatttctgtttaactgtggtcaaagttttggagctttacaaacctcacgagtatgtagtagatcttaatgcaatgtacaaacggagaaagcctaaacttgagaaaagatttcaaacaaagcgggaagttgaaatttacaatgttgcacctaaagcctatcagagctacccaattgtagaaccgtttagtggaaaggacgttgaagatttaaagagtaatattaagaaattttag

SEQ ID NO: 672 - DNA, 900 bp, synthetic construct
  misc_feature 1..900: note = GAD1 homologous NA sequence
  source 1..900: mol_type = other DNA
ttgagtaataagaaatcaacacatgacgacaagctcaaattgattgtgattaaaactaaaagtagggtgtatgtatcagataacataaataatggttcgtatcattacactaaaattaaagagcttatattcgacggcgttaagccagttccgacatttaaagcagattggtttgagattaaagaggttccagaattgatccaaaagaaattgccttcagaacgaatcaatactagatatgaacttaaagaagcacattatagtactggattgcccaaagtgcttcggtctcaagattttagtgaagaaggacagtatgagtcagtttatggtctatatgatctgagatatgaattaactgaaccaaagttggtagaagtagagtttgagttgaatgtcatcgtagaagactcagattttgaaattgtccgaagcgactacaatctacaacactcagttttagatcaaatcattacacatcctgtgctgttatcaactcgaccatgcacactatcaagacaagaaagctacaatattgttcgcaaatacataaaagcaaatattgatccaaggtgggcaaccattacaagtgactacgacttttgttttactgtcagtaaaaatatcgagcatgaaccagaagaatatagagttaacgtaggaaagcgtaaaccaaaatacgagacaagatatacaagatctagaacagtaaaggtatatgaaacttctccaaagtcatatgaccgttacccagtcatagaaccgtttgcaggaaaaaatgaagaagatttgaaacagaatatacaaaaatttttagatgggcttatgaaagttatcaataagccattaattgagtgcgaacattgtaaaggatatggagtgagcaactatgaagtttaa

SEQ ID NO: 673 - DNA, 888 bp, synthetic construct
  misc_feature 1..888: note = GAD1 homologous NA sequence
  source 1..888: mol_type = other DNA
ttgattaaatttaaagtaattgactgtaaaaattacatctatatatcaaagtgtgatagatggaattgtgattgcagcaaatatttatttgatggcaaggtggcagaatctacaaatagaacggaatggtataagatagataaaattccaaccgttgtatcagaaaagaaacctgatgaaaatattaacgagagatatgaattaaaagctggatatactgcaaatgatttaatgccaaaggtcatcaataaagacagggtagatgaatatgaggaagtaatgggtttatatacatataaatatgattcagttccgggtggttatgaggatattgagtttaacattgagaaaatttatgagagagaagattttgaatttatccctaataaatatagtgctgaaactgatttaattacacagattgaatatccagaagaagtatatcaggataagccttgcagaattgattcttctcatatgttcaaacttattagagaatatgtaaaagcacatattgatacttcagttgcgacaattaaatctgattatgattttcacttccaagtagtaaagaaaattactttagctgatccatatagtatcagagtcgatatgaataattcctttatgaataaaagaagaaaacctaaatgggtagatagaatgatttccactaaagagacaactattattaattttaaggacgaagtttcttctagagattatggagatgactgtagaattgctccatcaattggcggtgaaaattatgtagatttacagaataaagtagagaattatctatcagaacttatgaaacagattaacaaaaattattgtgaatgtcctaactgtaaaggttggggaattgtggaggtagaagaataa

SEQ ID NO: 674 - DNA, 885 bp, synthetic construct
  misc_feature 1..885: note = GAD1 homologous NA sequence
  source 1..885: mol_type = other DNA
ttggattttaagattatagattgcattgattacatttatatttcaaaaaatgaaagatatagcacgtctcttgataatttattttttgatggagaaaaagcagaaaaaacaaataaaaatgggtggtacaaattacctcgtattcccaaaaacataacaattaaaaagccaaatgagcaaatagataaaaggtatgaattaaaatctggttatgctgctacagaattaatgccacaaatcattacaatgggaatgtataacactgatgaatatgatgaaataattggttgctattcattaaaatatgatgagatagatggcggatttgaggacgtagaattcactattgataaagtatacacgaagaaagattttgaatttattccgaatacatatcaagcaagtgttgggctattgacagaaatcgaatatccagaggaaatttatcaggatatgccatgtaaattggattccaagcaggtttttgatttgattagggaacatgtaaaagctaatataaatacttctattgcaaaagtaacttctgattatgattttcattttgaagtgacaagaagtatcggattggctaatccatatacaaaaatggttgatacaaataattcttggatgaataaaagaagaaagccaaaatgggttgaaaaaatggtatctgataaatctgttcctatcttaaatattaagacacccagttcaagtgattatggaaaagattgcgtaattccttctccaataataggggaaaattataaagatttagagaaaaaggttaacagctatttagatgaaattatgattaatattaataaaaaatattgtgaatgtcctcaatgtcagggttggggagttgtggaggtggaataa

SEQ ID NO: 675 - protein, 294 aa, synthetic construct
  REGION 1..294: note = GAD1 homologous AA sequence
LDFKIIDCIDYIYISKNERYSTSLDNLFFDGEKAEKTNKNGWYKLPRIPKNITIKKPNEQIDKRYELKSGYAATELMPQIITMGMYNTDEYDEIIGCYSLKYDEIDGGFEDVEFTIDKVYTKKDFEFIPNTYQASVGLLTEIEYPEEIYQDMPCKLDSKQVFDLIREHVKANINTSIAKVTSDYDFHFEVTRSIGLANPYTKMVDTNNSWMNKRRKPKWVEKMVSDKSVPILNIKTPSSSDYGKDCVIPSPIIGENYKDLEKKVNSYLDEIMININKKYCECPQCQGWGVVEVE

SEQ ID NO: 676 - protein, 295 aa, synthetic construct
  REGION 1..295: note = GAD1 homologous AA sequence
LKLIGIKTNNCFLVSDNIQGETYFHSQLKGLLFDGKPATATYKSDWFKLKKEPSVIEKQMPAKKINHRYELKEGFQESELTPKVIYASYIGEDNEYYEVKGLYELKFEEVPQQNQKIEFEMNIIEEVNGELKIQSQNFNLKYNLLDRIQTHPMLLETKPCYLSRAESYKIIRNHIKANINPKFARITSDYDFCFTVVKVLELYMPHEYVVDLNAMYKRRKPKLEKRFQTKREVEIYKVAPEAYQSYPIVEPFSGKDVEDLKSNIKKFLDDLMAKINEPLVECKCCKGRGVILNEN

SEQ ID NO: 677 - protein, 300 aa, synthetic construct
  REGION 1..300: note = GAD1 homologous AA sequence
LNRGKAPASESLKLIAIKTKSKVYVSDNINNDSYFYSRIKDLIFDGSKPENTYKSDWFEVPCVPTTIQRSLPAEQINVRYELKEVHYNTGLPKVLQYSDFDEDTGQYESVYGLYERKFDLTEPGLENVEFELNVIAELEDFEIVRSDFQLQHSILDHITTHPILLSTKPCKLSRQESFNIVRKYIKANIDSKYASVTSDYDFCLSVSKKIEHAPESYRVDVGKRKPKYETRYSRSRTVKVYETAPKSYQTYPVIEPFEGKNEDDLKDIIQKFLDELMIVINKPLVECEHCKGYGVILDEV

SEQ ID NO: 678 - protein, 299 aa, synthetic construct
  REGION 1..299: note = GAD1 homologous AA sequence
LSNKKSTHDDKLKLIVIKTKSRVYVSDNINNGSYHYTKIKELIFDGVKPVPTFKADWFEIKEVPELIQKKLPSERINTRYELKEAHYSTGLPKVLRSQDFSEEGQYESVYGLYDLRYELTEPKLVEVEFELNVIVEDSDFEIVRSDYNLQHSVLDQIITHPVLLSTRPCTLSRQESYNIVRKYIKANIDPRWATITSDYDFCFTVSKNIEHEPEEYRVNVGKRKPKYETRYTRSRTVKVYETSPKSYDRYPVIEPFAGKNEEDLKQNIQKFLDGLMKVINKPLIECEHCKGYGVSNYEV

SEQ ID NO: 679 - protein, 188 aa, synthetic construct
  REGION 1..188: note = GAD1 homologous AA sequence
LTPQVINVSYIDEESEYYEVKGLYDLKFEEIPQVNEKIEFEMNVIEEIDGELKLQSHNFNLNYNLLDRIQTHPMLLETKPCYLSQEESYKIIRKHIKANINPKFARITSDYDFCLTVVKVLELYKPHEYVVDLNAMYKRRKPKLEKRFQTKREVEIYNVAPKAYQSYPIVEPFSGKDVEDLKSNIKKF

SEQ ID NO: 680 - protein, 324 aa, synthetic construct
  REGION 1..324: note = GAD1 homologous AA sequence
MDKKLQISIIKTDAGKCFITDCKASSGYHYNYHNSSIEGLIFDGLAAKPTFHKNWYEIPSYPEKIERLITGQKTNRRYELKDADLSSEKYPLIVSYDDRDSIDEDLLHSLYTLKSDDVPDYFQEVECGLDLICEVDNYRDAPEFSYPGIRRVQFSDEKYTISNQNIKHSLIDCIILPEPLRANSACEISSKEMFDLVRQHVKDNIQSGFARITSDYDFCFTVKKIIPLLKPHTYSYQDIFARTKKQRAKLHFKTDTSKEIEIFQMTHDRENYKGYTPIKGFKADNEWELKELIDSFLSTLMETIHSPIEQCSCCNGTGYMQDIK

SEQ ID NO: 681 - protein, 324 aa, synthetic construct
  REGION 1..324: note = GAD1 homologous AA sequence
MDKKLQISIIKTDAGKCFITDCKASSGYHYNYHNSSIEGLIFDGLAAKPTFHKNWYEIPSYPEKIERLITGQKTNRRYELKDADLSSEKYPLIVSYDDRDSIDEDLLHSLYTLKSDDVPDYLQEVECGLDLICEVDNYRDAPEFSYPGIRRVQFSDEKYTISNQNIKHSLIDCIILPEPLRANSACEISSKEMFDLVRQHVKDNIQSGFARITSDYDFCFTVKKIIPLLKPHTYSYQDIFARTKKQRAKLHFKTDTSKEIEIFQMTHDRENYKGYTPIKGFKADNEWELKELIDSFLSTLMETIHSPIEQCSCCNGTGYMQDIK

SEQ ID NO: 682 - protein, 326 aa, synthetic construct
  REGION 1..326: note = GAD1 homologous AA sequence
MEDKKVLQINIIKTNIGKCFITDCNETSGYNFDYHTTQVDKLLFDGHEPKRSFTKNWFEIPSYPEKVERLITGERQNKRFKLKDEELKSSKLPLEIPYGDSDELDKSILDSLYSLTYDIVPNYLMPINVEFNLVCEVDNFKDAPEFNYPAVRKYDFSEQQYSVTNQNIKHSLIDRIIVPAPLRANSPCEISSKEMYDLVRQHVKDNINPELARITSDYDFCFEVKKIIPLLEPYTHSYRDIFARTKKQRQKLHFKTVKSKEISIYEMTHEQQNYKGYTAIKGFSASNEWELKEMIDNFLSELMSTINAPIEQCPHCNGTGYLQNEK

SEQ ID NO: 683 - protein, 325 aa, synthetic construct
  REGION 1..325: note = GAD1 homologous AA sequence
MEDKKVLQINIIKTNVGKCFITDCNEINGYNFNYHKTQIDKLLFDGHKPKETFARCWFEIPIYPKKVEILITGERKNKRFKLKDDELQSSKFPLEIPLNERNEFDEDMLTSLYFLAYDIAPDYLKQINVYFNLICEVDNFKDAPEFNYPAVRKYDFSEQQYSVTNQNIKHSLIDCIVVPAPLRANSPCEISSKEMYDLVRQHVRDNINPKLARISSDFGFCFEVKKIIPILEPHIYSYHDVFARTKKQREKLHFKTAKSKEISIYQMTHAQENYKGYTAIKGFSASNEWELKEMIDNFLSELMNTIHTPIEQCSHCNGTGYLQNK

SEQ ID NO: 684 - protein, 326 aa, synthetic construct
  REGION 1..326: note = GAD1 homologous AA sequence
MENKKALQISIIKTNIGKCFITDCNVTSGYSFDYHNTQIDKLLFDGHKATETFAKNWFEIPTYPEKVEALITGEKQNRRFKLKDKELQSTKLPLEIPYDERNVFDEDVLYSLYSLTYDVVPDYLVLIDVNFNLICEVDNFRETPEFNYPAVRKYDFSDQQYSVINQNIKHSLIDSIIVPAPLLASSPCKISSKEMYDLVRQHVKDNINPKLARITSDYDFCFEVKKIIPLLEPCTFSYRDMFARTKKQRGKIHFKTATSKEITIYEMTHNQRNYNGYTPIKEFSASNEWELKEMIDNFLSELMDVIHAPIEECPHCNGTGYLQNEE

SEQ ID NO: 685 - protein, 326 aa, synthetic construct
  REGION 1..326: note = GAD1 homologous AA sequence
MESKPIEIEIIKTDAGQCFITDCTATNGYYFNNHETILDELLFDGMSPVKTFHTHWYSIEKFPSKVEEIISGETENERYELKDPELASDKLPREIAIGDSDNYDEDIIDSLYSLKHDVKPDYSVEVDVKFNIICEVENFKKAPEFNYPAIKRVGFSDEMYSVTNQNVKHSLIDCIITPEPVRSNSPCKISSKEMYDLVRQHIINNIDTKIARITSDYDFCFEVKKIIPLLKPHTYSYKDVFARTKKQREKLHFKKDVAKEVSIYEMTHEQENYKGYTPIKSFSASNEWELKEMIDNYLSEVMQIIHAPLRICECCDGTGYLQNENN

SEQ ID NO: 686 - protein, 326 aa, synthetic construct
  REGION 1..326: note = GAD1 homologous AA sequence
MESKPIEIEIIKTDAGQCFITDCTATNGYYFNNHETILDELLFDGMSPVKTFHTHWYSIEKFPSKVEEIISGETENERYELKDPELASDKLPREIAIGDSDNYDEDIIDSLYSLKYDVKPDYSVEVDVKFNIICEVENFKKAPEFNYPAIKRVGFSDEMYSVTNQNVKHSLIDCIITPEPVRSNSPCKISSKEMYDLVRQHIINNIDTKIARITSDYDFCFEVKKIIPLLKPHTYSYKDVFARTKKQREKLHFKKDVAKEVSIYEMTHEQENYKGYTPIKSFSASNEWELKEMIDNYLSEVMQIIHAPLRICECCDGTGYLQNENN

SEQ ID NO: 687 - protein, 295 aa, synthetic construct
  REGION 1..295: note = GAD1 homologous AA sequence
MIKFKVIDCKNYIYISKCDRWNCDCSKYLFDGKVAESTNRTEWYKIDKIPTVVSEKKPDENINERYELKAGYTANDLMPKVINKDRVDEYEEVMGLYTYKYDSVPGGYEDIEFNIEKIYEREDFEFIPNKYSAETDLITQIEYPEEVYQDKPCRIDSSHMFKLIREYVKAHIDTSVATIKSDYDFHFQVVKKITLADPYSIRVDMNNSFMNKRRKPKWVDRMISTKETTIINFKDEVSSRDYGDDCRIAPSIGGENYVDLQNKVENYLSELMKQINKNYCECPNCKGWGIVEVEE

SEQ ID NO: 688 - protein, 297 aa, synthetic construct
  REGION 1..297: note = GAD1 homologous AA sequence
MILIKFKVIDCKNYIYISKGDRWNCDCSKYLFDGKVAEPTNKTEWYRLDKIPTVVSEKRPDEHINKRYELKAGYTANDLMPKVINEDHTDEYEEVIGLYTYKYDSVPGGYEDIEFSIEKIYKREDFTFVPNKYSAETDLITQIEYPEEAFQDKPCRIDSSRMLKLIREYVKAHIDTSVASIKSDYDFHFQVVKKIALADPYSIRVDTNNSFMNKRRKPKWVDRMISTKETTIINFKDKASSSDYGDDCRIAPSIEGENYVDLQNKVENYLLELMKQINKNYCECPNCKGWGIVEAEE

SEQ ID NO: 689 - protein, 301 aa, synthetic construct
  REGION 1..301: note = GAD1 homologous AA sequence
MKENQTKLKLIAIKTKEKVFISDNIENSYYHTSRIKQYLFDGVEPKETYQKSWYELKSIPNKVERRVPPQRINERYELKAGFPESELTPKIINEKYIDEDSPYAEVIGLYEKKFELTEETYEEIPFEINIIEELDQFEITKQEYELKYNFLDLLNTHPVLLPTKPCKMTRKDSFNIIRKYIRENIDQRYAKIDADYDFVFRVKKKIELYEPFEYEVNLNQGTRRKPNFVKRYRNTKEITILEISPDVKKDYEPATEFSGENEQDLKNKINTYLQELIAEINRPYVECKHCQGYGVVLKEDN

SEQ ID NO: 690 - protein, 352 aa, synthetic construct
  REGION 1..352: note = GAD1 homologous AA sequence
MKETFYRFKRGELQMNNNTSTTNLPQMLCIKTDKGCFISDCLTVNGYDYEYHRTEIDNLLFDGKKAVGAHCKNWYYIDKYPTLIQRKESGESINRRYEIKNESLISDSLPAVIPYEEAENYDSDVVDALYFYKWDQEPPHLKEIIYDIQVICEIENYNFPPKIEYKGFHHNRSSCSDERYIITNANVQHQMLDKIIFPEVTLHEYPCKFTSKQMYDITRQYIIEHIDNSVAKITSNYDFCFEVRKIIPMIEPETVTYTNIFAKTKRERNKIHTVIKEYDEKKIFSMTHKNEQYKGYPIIPEMCANNEAELKEKVDMWLENLIKLINEPLYQCPQCKGLGYVNNVSEIGFDYE

SEQ ID NO: 691 - protein, 287 aa, synthetic construct
  REGION 1..287: note = GAD1 homologous AA sequence
MKIQLIKTKDKYLYKFVGYCYISDHLMNGKEIQETFNNNWYVINEYPNLLQEKETIKINERWTLKNKDLYNETIPLIVDEHSKEKYKNLVDSDLYEYTYEEKEIYKKVELEIEELGEIDDDIPFEHKEILQTEFGWYSRGKKEVYLINEVNFSLKDNCLTPTPIKELTKPCMLKKEFLHQILTDYIKRNIDLTYAKVKDDYDWRFNVVTNNQRQMYILSWSSDRNDKNWTLQNLYANNFKELVKKIKQMENEIITYINKDHVCPYCNGTGCKTEKFDTNKWFSEVNK

SEQ ID NO: 692 - protein, 287 aa, synthetic construct
  REGION 1..287: note = GAD1 homologous AA sequence
MKIQLVKTKDKCLYKFDEYCYASEHLMNGKEIQKTFNDYWYVIDEYPTLLQKKETIKINERWTLKNKDLYNETIPLVVDEHSKDKYKNLVESDLYEYTYEEKEILKDIELEIEEIGVIDDDVPFEHKERIESSHGWYSRGKEDVYLINKINFSLKDNCLTPTPIKELTKPCVLCKDYLFQILTDYIKRNIDLNYAIVKDDYTWRFSVVTNNQRQICILCWINHNNDKTWTLKDLYASNFKELVKKIEKMEKEIINYINKEHVCPHCNGTGCISEKFDTNKWFSEVNK

SEQ ID NO: 693 - protein, 295 aa, synthetic construct
  REGION 1..295: note = GAD1 homologous AA sequence
MKLIGIKTNNCFLVSDNIEDKRYFHSQLDELLFDGKQAAKTYKSDWFKLDKEPSVIEKQMPTKKINHRYELKEGFQETDLTPQVINVSYIDEESEYYEVKGLYDLKFEEVPQQNEKIEFEMNVIEEIDGELKLQSHNFNLNYNLLDRIQTHPMLLETKPCHLSREESYKIIRNHIKANINPKLARVTSDYDFCFTVVKVLELYKPHEYIVDLNAMYKRRKPKLEKRFQTKREVEIYNVAPKAYQSYPIVEPFSGKDVEDLKSNIKKFLDDLMAKINEPLVECECCKGRGVILNEY

SEQ ID NO: 694 - protein, 295 aa, synthetic construct
  REGION 1..295: note = GAD1 homologous AA sequence
MKLIGIKTNNCFLVSDNIEGKRYFHSQLDELLFDGERATETYKSDWFKLHKEPSVIEKQMPAKKINHRYELKEGFQETDLTPQVINVSYIDEESEYYEVKGLYDLKFEEIPQQNEKIEFEMNIIEEIDGELKLQSHNFNLNYNLLDRIQTHPMLLETKPCYLSREESYKIIRNHIKANINPKFARITSDYDFCLTVVKVLELYKPHEYVVDLNAMYKRRKPKLEKRFQTKREVEIYKVAPEAYQSYPIVEPFSGKDVEDLKSNIKNFLDDLMDKINEPLVECKCCEGRGVILSEN

SEQ ID NO: 695 - protein, 298 aa, synthetic construct
  REGION 1..298: note = GAD1 homologous AA sequence
MKLIGIKTNNCFLVSDNIQGETYFRSQLEGYLFDGEKAEKTYKSDWFKLDKQPKTIEKKLAAKRINYRYELKEQFQETELTPKVINVSYIDEGSEFYEVKGLYDLKFDQEPQKNEKVDFELNVLEEFDGELKLGKQEFNLKYNLLDKIQTHPMMLETKPCYLSHKESYNIIRNHVNANINPKYARITSDYDFCLTVNKVVELYEHEEYVVDLNRMYKRRKPKLEKRLRTKKEAIIYEVAPKAYQNYPIVEPFCGENVEDMKNNIKVFLDELMANINEPLIECKHCKGRGVVSNENPIG

SEQ ID NO: 696 - protein, 295 aa, synthetic construct
  REGION 1..295: note = GAD1 homologous AA sequence
MKLIGIKTNNCFLVSDNIQGSSYFHSQLEGLLFDGKRATATYKSDWFKLEKEPSVIEKQMPPIKINHRYELKEGFQESELTPKVINASYIGEESEYYEVKGLYDLKFEEVPQQNQKIEFEMNVIEEIDGELKLQSHNFNLNYNLLDRIQTHPMLLETKPCYLSHEESYKIIRNHIKANINPKFARITSDYDFCFTVVKVLELYKPHEYVVDLNAMYKRRKPKLEKRFQTKREVEIYNVAPKAYQRYPIVEPFSGKDVEDLKSNIKKFLYDLMAKINEPLVECKCCKGRGVILNEN

SEQ ID NO: 697 - protein, 295 aa, synthetic construct
  REGION 1..295: note = GAD1 homologous AA sequence
MKLIGIKTNNCFLVSDNVQGSSYFHSQLEGLLFDGERATATYKSDWFKLVKEPSVIEKRMPAKKINHRYELKEGFQESELTPKVIYASYIGEDNEYYEVKGLYELKFEEVPQQNQKIEFEMNIIEEVNGELKMQSQNFNLKYNLLDRIQTHPMLLETKPCYLSRAESYKIIRNHIKANINPKFARITSDYDFCFTVVKVLELYKPHEYVVDLNAMYKRRKPKLEKRFQTKREVEIYKVAPEAYQSYPIVEPFSGKDVEDLKSNIKNFLDDLMDKINEPLVECKCCEGRGVILSEN

SEQ ID NO: 698 - protein, 243 aa, synthetic construct
  REGION 1..243: note = GAD1 homologous AA sequence
MKLIGIKTSNCFLVSDNIEGKKYFHSQLDELFFDGKRATETYKSDWFKLDKEPSVIEKQMPAKKINHRYELKEGFQETDLTPQVIKTSYIGEDSEYYEVKGLYDLKFEEVPQQNQKIEFEMNVIEEIDGELKLQSHNFNLNYNLLDRIQTHPMLLETKPCYLSREESYKIIRNHIKANINPKFARITSDYDFCLTVVKVLELYKPQEYVVDLNAMYKRRKPKLEKRFQTKREVEIYNVAPKAY

SEQ ID NO: 699 - protein, 295 aa, synthetic construct
  REGION 1..295: note = GAD1 homologous AA sequence
MKLIGIKTSNCFLVSDNIEGKKYFHSQLDELFFDGKRATETYKSDWFKLDKEPSVIEKQMPAKKINHRYELKEGFQETDLTPQVIKTSYIGEDSEYYEVKGLYDLKFEEVPQQNQKIEFEMNVIEEIDGELKLQSHNFNLNYNLLDRIQTHPMLLETKPCYLSREESYKIIRNHIKANINPKFARITSDYDFCLTVVKVLELYKPQEYVVDLNAMYKRRKPKLEKRFQTKREVEIYNVAPKAYQSYPIVEPFSGKDVEDLKSNIKKFLDDLMTKINEPLVECECCKGRGVILNEN

SEQ ID NO: 700 - protein, 295 aa, synthetic construct
  REGION 1..295: note = GAD1 homologous AA sequence
MKLIGIKTSNCFLVSDNIEGKKYFHSQLDELFFDGKRATETYKSDWFKLDKEPSVIEKQMPAKKINHRYELKEGFQETDLTPQVIKTSYIGEDSEYYEVKGLYNLKFEEVPQQNQKIEFEMNVIEEIDGELKLQSHNFNLNYNLLDRIQTHPMLLETKPCYLSREESYKIIRNHIKANINPKFARITSDYDFCLTVVKVLELCKPQEYVVDLNTMYKRRKPKLEKRFQTKREVEIYNVAPKAYQSYPIVEPFSGKDVEDLKGNIKKFLDDLMDKINEPLVECKCCEGRGVILSEN

SEQ ID NO: 701 - protein, 295 aa, synthetic construct
  REGION 1..295: note = GAD1 homologous AA sequence
MKLIGIKTSNCFLVSDNIEGKKYFHSQLDELFFDGKRATETYKSDWFKLDKEPSVIEKQMPAKKINQRYELKEGFQETDLTPQVIKTSYIGEDSEYYEVKGLYDLKFEEVPQQNQKIEFEMNVIEEIDGELKLQSHNFNLNYNLLDRIQTHPMLLETKPCYLSREESYKIIRDHIKANINPKLARITSDYDFCLTVVKVLELYKPQEYVVDLNAMYKRRKPKLEKRFQTKREVEIYNVAPKAYQSYPIVEPFSGNDVEDLKSNIKKFLDDLMTKINEPLVECECCKGRGVILNEN

SEQ ID NO: 702 - protein, 295 aa, synthetic construct
  REGION 1..295: note = GAD1 homologous AA sequence
MKLIGIKTSNCFLVSDNIEGKKYFHSQLDELLFDGKRAAETYMSDWFKLDKEPSVIEKQMPAKKINHRYELKEGFQETDLTPQVINVSYIDEESEYYEVKGLYDLKFEEIPQVNEKIEFEMNVIEEIDGELKLQSHNFNLNYNLLDRIQTHPMLLETKPCYLSQEESYKIIRKHIKANINPKFARITSDYDFCLTVVKVLELYKPHEYVVDLNAMYKRRKPKLEKRLQTKREVEIYNVAPKAYQSYPIVEPFSGKDVEDLKSNIKKFLDDLMAKINEPLVECKCCKGRGVILNEN

SEQ ID NO: 703 - protein, 70 aa, synthetic construct
  REGION 1..70: note = GAD1 homologous AA sequence
MKLIGIKTSNCFLVSDNIEGKKYFHSQLDELLFDGKRAAETYMSDWFKLDKEPSVIEKQMPAKKSIIGMN

SEQ ID NO: 704 - protein, 295 aa, synthetic construct
  REGION 1..295: note = GAD1 homologous AA sequence
MKLIGIKTSNCFLVSDNIEGKRYFHSQLDELLFDGKRATETYKSDWFKLDKEPRVIERQMPAKKINHRYELKEGFQETDLTPQVINVSYIDEESEYYEVKGLYDLKFEEVPQQNEKIEFEMNVIEEIDGELKLQSHNFNLNYNLLDRIQTHPMLLETKPCYLSREESYKIIRNHIKANINPKFARITSDYDFCLTVVKVLELYKPHEYVVDLNAMYKRRKPKLEKRFQTKREVEIYNVAPKAYQSYPIVEPFSGKDVEDLKSNIKKFLDDLMAKINEPLVECKCCKGRGVILNEN

SEQ ID NO: 705 - protein, 295 aa, synthetic construct
  REGION 1..295: note = GAD1 homologous AA sequence
MKLIGIKTSNCFLVSDNIEGKRYFHSQLDELLFDGKRATETYKSDWFKLEKEPSVIEKQLPAKKINHRYELKEGFQESELTPKVIKASYIGEDSEYYEVKGLYDLKFEEIPQQNEKIEFEMNVIEEIDGELKLQSHNFNLNYNLLDRIQTHPMLLETKPCYLSQEESYKIIRNHIKANINPKFARITSDYDFCLTVVKVLELYKPHEYIVDLNAMYKRRKPKLEKRFQTKREVEIYKVAPKAYQSYPIVEPFSGKDVEDLKSNIKKFLDDLMAKINEPLVECKCCKGRGVILNEN

SEQ ID NO: 706 - protein, 297 aa, synthetic construct
  REGION 1..297: note = GAD1 homologous AA sequence
MKLIGIKTSNCFLVSDNIEGKRYFHSQLDELLFDGKRATETYKSDWFKLEKEPSVIEKQMPAKKINHRYELKEGFQESELTPKVIKDSYIGEDSEYYEVKGLYDLKFEEVPQQNQKIEFEMNVIEEIDGELKLQSQNFNLNYNLLDRIQTHPMLLETKPCYLSHEESYKIIRNHIKANINPKFARITSDYDFCLTVVKVLELYKPHEYIVDLNAMYKRRKPKLEKRFQTKREVEIYNVAPKAYQSYPNPIVEPFSGKDVEDLKSNIKKFLDDLMAKINEPLVECKCCKGRGVILNEN

SEQ ID NO: 707 - protein, 295 aa, synthetic construct
  REGION 1..295: note = GAD1 homologous AA sequence
MKLIGIKTSNCFLVSDNIEGNKYFHSQLDELFFDGKRATQTYKSDWFKLDKEPSVIEKQMPAKKINYRYELKEGFQETDLTPQVIKTSYIGEDSEYYEVKGLYDLKFEEIPQENQKIEFEMNVIEEIDGELKLQSHNFNLNYNLLDRIQTHPMLLETKPCYLSREESYKIIRNHIKANINPKFARITSDYDFCLTVVKVLELYKPHEYIVDLNAMYKRRKPKLEKRFQTKREVEIYNVAPKAYQSYPIVEPFSGKGVEDLKSNIKKFLDDLMAKINEPLVECKCCKGRGVILNEN

SEQ ID NO: 708 - protein, 295 aa, synthetic construct
  REGION 1..295: note = GAD1 homologous AA sequence
MKLIGIKTSNCFLVSDNIEGNKYFHSQLDELFFDGKRATQTYKSDWFKLDKEPSVIEKQMPAKKINYRYELKEGFQETDLTPQVIKTSYIGEDSEYYEVKGLYDLKFEEVPQENQKIEFEMNVIEEIDGELKLQSHNFNLNYNLLDRIQTHPMLLETKPCYLSREESYKIIRNHIKANINPKLARITSDYDFCLTVVKVLELYKPHEYVVDLNAMYKRRKPKLEKRFQTKREVEIYNVAPKAYQSYPIVEPFSGKDVEDLKSNIKKFLDDLMAKINEPLVECECCKGRGVILNEN

SEQ ID NO: 709 - protein, 295 aa, synthetic construct
  REGION 1..295: note = GAD1 homologous AA sequence
MKLIGIKTSNCFLVSDNIKGKRYFHSQLDELLFDGKRATQTYKSDWFKLDKEPSVIEKQMPAKKINHRYELKEGFQESELTPKVIKDSYIGEDSEYYEVKGLYDLKFEEVPQQNQKIEFEMNVIEEIDGELKLQSQNFNLNYNLLDRIQTHPMLLETKPCYLSHEESYKIIRNHIKANINPKFARITSDYDFCLTVVKVLELYKPHEYIVDLNAMYKRRKPKLEKRFQTKREVEIYNVAPKAYQSYPIVEPFSGKDVEDLKSNIKKFLDDLMAKINEPLVECKCCKGRGVILNEN

SEQ ID NO: 710 - protein, 295 aa, synthetic construct
  REGION 1..295: note = GAD1 homologous AA sequence
MKLIGIKTSNCFLVSDNIKGKRYFHSQLDELLFDGKRATQTYKSDWFKLDKEPSVIEKQMPANKINYRYELKEGFQETDLTPQVIKTSYIGEDSEYYEVKGLYDLKFEEVPQQNQKIEFEMNVIEEIDGELKLQSQNFNLNYNLLDRIQTHPMLLETKPCYLSHEESYKIIRNHIKANINPKFARITSDYDFCLTVVKVLELYKPHEYIVDLNAMYKRRKPKLEKRFQTKREVEIYNVAPKAYQSYPIVEPFSGKDVEDLKSNIKKFLDDLMAKINEPLVECKCCKGRGVILNEN

SEQ ID NO: 711 - protein, 310 aa, synthetic construct
  REGION 1..310: note = GAD1 homologous AA sequence
MKLQTIKCSDGYFLKDAVGLRFGKEDVTATWNREWFKVSSVEGRQVYRVTLATQRLSGYSLKPEFVATDAMPSSVGVDFFAYSDDKQNNAHLRGLYEPTYEPVPEKAEPIEIELEIIATVDGELVQKAMNFPVYGTYSHEGKRWSVTEQSIQVSLLDRITAPSLLHQEVPCQLSSEDSFKIIRTHVKDNIDPKVAAITSDYDFCLTVQKKIKLAEPEPYTRDANFSFFGRRRKPRMVTDYRTERKLVVYETAPLRGGEVYKGYTKTEPFTGHNVQELKQNIEAYLKELMAEINKPLVDCPNCKGHGVMTA

SEQ ID NO: 712 - protein, 326 aa, synthetic construct
  REGION 1..326: note = GAD1 homologous AA sequence
MKLYMIKTDTRCFITTCTPSEWGSTYAKSYELKELLFDGEHAKPTYLPEWYVIDSYPTKIEKKEVVYDYRKYVLKDEYKGCSGFKEEIEYDDRFNFEYEIDSFYNYEYHKREVTQEVDNLKIEVIMELEKFNLPTIEYSAYGETSINGFWDKEYYITNKDVEHQLIDKMMFPDILLSERPCKLTSKQMYDITRAYIKDNIDNKYASISSDFDFCFKVEKKIKKYTPEEVTYYNIFARTKKQRNTPHKKTVKYRNETIFRMTNSVAKYNEYPIIEEMTAKNETELKEKVDTWLSELIEKINEPLVECPHCNGLGVINEIKEISCNDR

SEQ ID NO: 713 - protein, 326 aa, synthetic construct
  REGION 1..326: note = GAD1 homologous AA sequence
MKLYMIKTNTKCFITTCTPEEWGETYAKSYGLKELLFDGKYAKPTYLPEWYVIDLYPAKIEKKGVVYDYRKYVLKDEYKGCLGFKEEIDYDNRFKFEHEIDSFYNYEYQKREVNQEVNDLEIEVIIELENFNLPTIEYKAYGATNMNAYWDGEYNITNKGVRHQLIDKMMFPDILLPERPCKFTSKQMYDITRAYIKDNINNKYATISSDYDFCFEVKKKIKKYTPEEVTYYNIFAKTKKQRNTPHKKIVKYREETIFKMTNSKSKYDGYPIIEEMTAKNETELKEKVDTWLSELIKKINEPLVECPHCNGLGVISEIKEINCNDR

SEQ ID NO: 714 - protein, 326 aa, synthetic construct
  REGION 1..326: note = GAD1 homologous AA sequence
MKLYMIKTNTKCFITTCTPEEWGSTYAKSRGLKELLFDGEYAKPTYLPEWYVIDSYPTKIEKKGVVYDYRKYVLKDEYKGCLGFKEEVDYNDRFNFEHDIDSFYNYEYQKREVNQEVDNLEIEVIMELENFNLPTIEYKAYGATNMNAYWDGEYNITNKGVRHQLIDKMMFPDILLPERPCKFTSKQMYDITRAYIKDNINNKYATISSDYNFCFEVKKKIKKYTPEEVTYYNIFARTKKQRNTPHKKIVKYREETIFKMTNSKSKYDGYPIIEEMTAKNETELKEKVDTWLSNLIEKINEPLVECPHCNGLGVISEIKEINCNDR

SEQ ID NO: 715 - protein, 319 aa, synthetic construct
  REGION 1..319: note = GAD1 homologous AA sequence
MKNKIMLIKTDKCCFISDLYTNKKDSYDYNYHHSAFVNWLFDDKKCTQTWAKHWFRIEKYPETITVECVETINKRYEIKDKKYITDSLPAVILCANKNDYDEDVIDSLYEFKKDTITSQQKVDVEIETVLEVENFHEVPFDFVGIHEINFGDKPYHITSADVHHQLIDEIMIPQVLLTEYPCRLTSKQMYDITRQYVREHIDKEQASITSDYDFCFTVKKIIPLYEPETLSYHYIFARTKKEREKVHFRVAKHKESTIFEMTDDINHYSGYSIIEGLTANSEKELKEKVDLWLTELMKKINKPLCTCDKCKGIGIIDKA

SEQ ID NO: 716 - protein, 301 aa, synthetic construct
  REGION 1..301: note = GAD1 homologous AA sequence
MKRGFLMKLIGIKTNNCFLVSDNIQGDSYFYSQLDNLLFDGKRAAKTYKSDWFKLDKEPSVIEKQMPAQEINHRYELKEGFQETDLTPKVIDVSYIDEESEYYEVKGLYDLKFEEVPQQNEKIEFEMNVIEEFDGELKLKSHNFNLKYNLLDRIQTHPMLLETKPCYLSQEESYKIIRNHIKANINPKFARITSDYDFCLTVVKVLELYKPYEYVVDINAMYKRRKPKLEKRFQTKREVEIYNVAPKAYQNYSIVEPFSGNDVEDLKSNIKKFLDDLMAKINEPLVECKCCKGRGVILNEN

SEQ ID NO: 717 - protein, 143 aa, synthetic construct
  REGION 1..143: note = GAD1 homologous AA sequence
MLLETKPCYLSREESYKIIRNHIKANINPKFARITSDYDFCLTVVKVLELYKPQEYVVDLNAMYKRRKPKLEKRFQTKREVEIYNVAPKAYQSYPIVEPFSGKDVEDLKSNIKKFLDDLMTKINEPLVECECCKGRGVILNEN

SEQ ID NO: 718 - protein, 294 aa, synthetic construct
  REGION 1..294: note = GAD1 homologous AA sequence
MNFKIIDCIDYIYISKNERYNSAIDNLLFDGERAEITNKNYWYKLPHIPKSVTVKKSNEQINKRYELKSGYAATELMPQIITMEMYNTDEYDEIIGCYSLKYDEVDGGYEDIEFTIDKIYTKKDFEFVPNTYCANVGLLTEIEYPEEVYQDMPCKLDSKQVFDLIREHVKANINTSIAKVTSDYDFHFEVTRNIGLANPYTKMVDTNNSWINKRRKPKWVERMVSDKSVPILNIKTPGSNDYGKDCVVPSPITGENYKDLETKVKTYLEEIIKSINKKYCECPQCQGWGVVEVE

SEQ ID NO: 719 - protein, 327 aa, synthetic construct
  REGION 1..327: note = GAD1 homologous AA sequence
MNIYMVKTNKECFISDCKVFSGSDYEYHRTQLTNLYFDGEKPKETYCKNWYVIDKYPEKIETESIEYTNERYEINNKNLICEKFPETIKKEDRGKFNFDISEFYTFKRDKLPLRLVEVENVNVEIIIELDSFKMPNKIEYDIVCDKEHYKNNSAYKITNANVKHQFLDKMIFPEIMLSSRPCKLTSKQMYDITRKYIKDNIDLSKAKITSDYKFCFAVKKIIPLLTPEKISCTNIFARTKKERNKIHHEIKEYKEVEIFSMTHKQENYGGYTAIDELCANNENELKEKVDTWLKGVIDIINKPLTQCEHCNGTGYIDEIKKIELNQN

SEQ ID NO: 720 - protein, 327 aa, synthetic construct
  REGION 1..327: note = GAD1 homologous AA sequence
MNIYMVKTNKECFISDCKVFSGSDYEYHRTQLTNLYFDGEKPKETYCKNWYVIDKYPEKIETESIEYTNERYEINNKNLICEKFPETIKKEDRGKFNFDITEFYTFKRDKLPLRLVEAENVNVEIIIELDSFKMPNKIEYDIVCDKEHYKNNSAYKITNANVKHQFLDKMIFPEIMLSSRPCKLTSKQMYDITRKYIKDNIDLSKAKITSDYKFCFAVKKIIPLLTPEKISYTNIFARTKKERNKIHHEIKEYKEVEIFSMTHKQENYGGYTAIDELCANNENELKEKVDTWLKGVVDIINKPLTQCEHCNGTGYIDEIKKIELNQN

SEQ ID NO: 721 - protein, 338 aa, synthetic construct
  REGION 1..338: note = GAD1 homologous AA sequence
MNNNTSTTNLPQMLCIKTDKCCFISDCLTVNGYDYEYHRTEIDNLLFDGKKAVGAHCKNWYYIDKYPTLIQRKEPGESINRRYEIKNASLISDSLPAVIPYEEAENYDSDVVDALYFYKWDQEPPHLKEIIYDIQVICEIENYNFPPKIEYKGFHRNHSSYSDEQYIITNANVQHQMLDKIIFPEVTLHEYPCKFTSKQMYDITRQYIIEHIDNSVAKIAYNYDSFVEVRKIIPIIEPETVTYTNIFAKTKRERNKIHTVIKEYDEKKIFSMTHKNEQYKDYPIIPEMCANSETELKEKVDMWLENLIKFINEPLCQCPQCKGLGYVNNVSEIGFDYE

SEQ ID NO: 722 - protein, 338 aa, synthetic construct
  REGION 1..338: note = GAD1 homologous AA sequence
MNNNTSTTNLPQMLCIKTDKGCFISDCLTVNGYDYEYHRTEIDNLLFDGKKAVGAHCKNWYYIDKYPTLIQRKESGESINRRYEIKNESLISDSLPAVIPYEEAENYDSDVVDALYFYKWDQEPPHLKEIIYDIQVICEIENYNFPPKIEYKGFHHNRSSCSDERYIITNANVQHQMLDKIIFPEVTLHEYPCKFTSKQMYDITRQYIIEHIDNSVAKITSNYDFCFEVRKIIPMIEPETVTYTNIFAKTKRERNKIHTVIKEYDEKKIFSMTHKNEQYKGYPIIPEMCANNEAELKEKVDMWLENLIKLINEPLYQCPQCKGLGYVNNVSEIGFDYE

SEQ ID NO: 723 - protein, 324 aa, synthetic construct
  REGION 1..324: note = GAD1 homologous AA sequence
MSNALQISIIKTDAGKCFITDCSAKDGYHYNYHQSRIADLYFDGEKASKTFHKNWLELKGYPEKIERLISGEKTNLRYELKDPDLESVKYPLTLAYDDRDSIDEEIRSSLYSFSFDVVPDYLVKVDADLVLMCEVENFREAPDFNYPAVKRVQFSEEPYRITNINIAHSLVDCLIIPEPLRASSPCEISSKEMYDLVRQHIKDNIKTSLARITSDYDFCFTVKKIIPLLEPHTYSYQDIFARTKKQRAKLHFKTATSKEIEIFQMTHEQSNYKGYTAIKGFKASNEWELKEMIDNFLATLMDTIHAPIEQCSCCGGTGYMQDIK

SEQ ID NO: 724 - protein, 324 aa, synthetic construct
  REGION 1..324: note = GAD1 homologous AA sequence
MSNALQISIIKTDAGKCFITDCTAKDGYHYQYHQSKIADLLFDGVKPKASFHKNWFEIEHYPEKVERIISGERINVRYELKDAELESKKYPLTLSYNERDAVDEDIRGSLYEYKYDTAPDYTSPVDAEFTLVCEVENFRDAPEFNYSAIRHVGFREERYVVKNINVKHSLVDCIIIPEPLRANSPCEISSKEMYDIVRQHVKDNIDNKLARITSDYAFCFTVKKIIPLLKPHTYSYQDIFARTKKQRAKLHFKTDTVKEIEIFQMTHDQENYKGYTAIKGFKANNEWELKEMIDNFLTTLMDTIHAPIEQCSCCCGTGYTQDIK

SEQ ID NO: 725 - protein, 324 aa, synthetic construct
  REGION 1..324: note = GAD1 homologous AA sequence
MSNALQISIIKTDAGKCFITDCTAKDGYHYQYHQSKIADLLFDGVKPKASFHKNWFEIEHYPEKVERIISGERINVRYELKDAELESKKYPLTLSYNERDAVDEDIRGSLYEYKYDTAPDYTSPVDVEFTLVCEVENFRDAPEFNYSAIRQVEFREERYVVKNINVKHSLVDCIIIPEPLRANSPCEISSKEMYDIVRQHVKDNIDNKLARITSDYAFCFTVKKIIPLLKPHTYSYQDIFARTKKQRAKLHFKTDTVKEIEIFQMTHDQENYKGYTAIKGFKANNEWELKEMIDNFLTTLMDTIHAPIEQCSCCGGTGYTQDIK

SEQ ID NO: 726 - protein, 348 aa, synthetic construct
  REGION 1..348: note = GAD1 homologous AA sequence
MTTNKLSIVAYNTDKGLYYANNQRDYNKQRVSIYSGILVNGGQPVDSEHKSGWYFLKGEDKITSVKKNQSGGYGEASWKLLDDSTHIDGVIPKVLTPTEADEFEDDCEWYIGQGSKYYAYRGLYKRVQERLPNIEVDVEFEVDYKGHIEYALVENNYKDMKIRVSNGSSWTPKVMEQSLTSITHYYELEELLTPDIVLHNRPCYITQDTTYNIVRNYIKENINPKHARLTSDYDFCLTVKKVIHIKPFTKSTEITKSNGRSYAKPQFKTQTISTKEVEIFEMCPSKKYQNYTPIEGFKGNSLADLVENMKLYLDHLMGVINTPVEECTSCGGLGCTYNKIDDINIRGE

SEQ ID NO: 727 - protein, 285 aa, synthetic construct
  REGION 1..285: note = GAD1 homologous AA sequence
MVNFTIISTVNGSMFIKDDRSYGSNIPDYFFDGEKLEATKKDKWFKISKTPTTVQKKGSDKQTNRRYELKAGYPISDLTPQIIAYDEFDSDDEIAGLYVFKYDTVEGILEDIEFEIEILAEEENFYVEKPKFPGTPLLMSELTSHPDLIDNKPCKIGSKELYEVTREYIKANIDSKYARVTSDYDFCLSVTKNIGIDPEPYYVTGGTKRKPTKELRYKRIRDVKAYETSPEGYSSYPTIQPISARNRKELDDKIQAFLEELIIDINKPYVECECCKGMGVILKEE

SEQ ID NO: 728 - protein, 303 aa, synthetic construct
  REGION 1..303: note = GAD1 homologous AA sequence
MYDKENPLKFKVINCKNYIYIANEDYYGTKDLTRFRFDGEMPEKTNKDKWFKLMSIPKVVSMKQQDKRINIRYELKAGYTATELMPQIITQEMEDSGEYEEVMGLYSYKYDTIPGEYEPIEFEIKEIYTREDFEFVPNKYNAKTDLLTQIEYPEEAYQDKPCKLDCDEMLKIIRNYVKANIDTNVADITSDYDFHFEVKKKIALADPYNILIDTNNNLFSKRKRKPNWVNRMISHKTETIIDFKNSTSTDYGKDCVKAPCIIGENYQDLQKKVEKFLTELISQINKKYCECPTCKGWGIVEGE

SEQ ID NO: 729 - protein, 303 aa, synthetic construct
  REGION 1..303: note = GAD1 homologous AA sequence
MYDKENPLKLKVINCKNYIYIANEDYYGTKDLTQFQFDGETPEKTNKDRWFKLMSIPKVVSAKQEDKRINVRYELKAGYTATELMPQIITQEMEQSEEYDEVIGLYNYKYDTIPGEYEPIEFEIKEIYAREDFEFIQNVYDAESSLLTQIEYPEEAYQDKPCKIDSKRMLQIIRNYVKANIDTSVATITSDYDFHFEVKKKIPLADPYNILVDKNNSLFNKRRKPQWVNKMVSEKSSTIINLKDNKTSSDYGNDCVVAPSIIGKNYQDLQNKIEKYLSELMEQINKKYCECPTCKGWGIVEGE

SEQ ID NO: 730 - protein, 303 aa, synthetic construct
  REGION 1..303: note = GAD1 homologous AA sequence
MYKSNDSTLKLVAIKTKSKILISDNINGENYFHTRLDNYFYDGEKPTKTYHKDWFEFKQMPTKIEKQLPAKRINERYELKEGFSETELTPKVINKSYIDEDSDFYEVKGLYDFKYETQEAGFEEIPFEITIAEEIDGEFEIVKMEHEPKYSLLDRITTHPVLLQTKPCYLTKEESYRIIRNHVKSNINSKYARVTSDYDFYFTVEKVIELYEPHSYEVNVNAAYSRRKPKYEKRYQRNRTQKIYEVAPKPYNSYPVVEPFTGKDYTDLKNNIDTFLHNLMEMINEPVVECKHCKGRGVVLNEN

SEQ ID NO: 731 - protein, 303 aa, synthetic construct
  REGION 1..303: note = GAD1 homologous AA sequence
MYSKENLLKLKVINCKNYIYIADEDYYGVTDLTRYLFDGEVPEKTNKDRWFKLNSIPKVVAAKQEDKRINVRYELKAGYTATELMPQIITQEMEQSEEYDEVIELYNYKYDTIPGEYEPIEFEIKEIYSRENFEFVPNKYNAKTDLLTQIEYPEEAYQDKPCKLDCDEMLKIIRNYVKANIDTNVADITSDYDFHFEVKKKIALADPYNILIDTNNNLFSKRKRKPKWVNRMISHKTETIIDFKNSTSTDFGKDCVKAPSIIGENYQDLQNKVEKFLTELMSQINKKYCECPTCKGWGIVEGE

SEQ ID NO: 732 - protein, 303 aa, synthetic construct
  REGION 1..303: note = GAD1 homologous AA sequence
MYSKENLLKLKVINCKNYIYIADEDYYGVTDLTRYLFDGEVPEKTNKDRWFKLNSIPKVVAAKQEDKRINVRYELKAGYTATELMPQIITQEMEQSEEYDEVIGLYNYKYDTIPGEYEPIEFEIKEIYSRENFEFVPNKYNAKTDLLTQIEYPEEAYQDKPCKLDCDEMLKIIRNYVKANIDTNVADITSDYDFHFEVKKKIALADPYNILIDTNNNLFSKRKRKPKWVNRMISHKTETIIDFKNSTSTDFGKDCVKAPSIIGENYQDLQNKVEKFLTELMSQINKKYCECPTCKGWGIVEGE

SEQ ID NO: 733 - protein, 303 aa, synthetic construct
  REGION 1..303: note = GAD1 homologous AA sequence
MYSKENPLKLKVINCKNYIYIANEDYFGVKDLTRYLFDGEVPEKTNKDRWFKLNNIPKVIAAKQEDKRINIRYELKAGYTATELMPQIITQEMKQSEEYDEVIGLYNYKYDTIPGEYEPIEFEIKEIYAREDFEFVPNEYNAKTDLLTQIEYPEEAYQDKPCKLDCDEMLKIIRNYVKANIDTNVADITSDYDFHFEVKKKIALADPYNILIDTNNNLFSKRKRKPKWVNRMISHKTETIIDFKNSTSIDYGKDCVKAPSIIGENYQDLQNKVERYLSELMTQINKKYCECPTCKGWGIIEGE

SEQ ID NO: 734 - protein, 303 aa, synthetic construct
  REGION 1..303: note = GAD1 homologous AA sequence
MYSKENPLKLKVINCKNYIYIANEDYFGVKDLTRYLFDGEVPEKTNKDRWFKLNSIPKVIAAKQEDKRINIRYELKAGYTATELMPQIITQEMKQSEEYDEVIGLYNYKYDTIPGEYEPIEFEIKEIYAREDFEFVPNEYNAKTDLLTQIEYPEEAYQDKPCKLDCDEMLKIIRNYVKANIDTNVADITSDYDFHFEVKKKIALADPYNILIDTNNNLFSKRKRKPKWVNRMISHKTETIIDFKNSTSIDYGKDCVKAPSIIGENYQDLQNKVERYLSELMTQINKKYCECPTCKGWGIIEGE

SEQ ID NO: 735 - protein, 303 aa, synthetic construct
  REGION 1..303: note = GAD1 homologous AA sequence
MYSKENPLKLKVINCKNYIYIANEDYFGVTDLTRYLFDGEVPEKTNKDRWFKLNSIPKVVAAKQEDKRINVRYELKAGYTATELMPQIITKEMEQSEEYDEVIGLYNYKYDTIPGEYEPIEFEIKEIYSRENFEFVQNIYGAETSLLTQIEYPEEAYQDKPCKIDSKIMLQIIRNYVKANIDTSVATITSDYEFHFEVKKKIPLADPYNILVDKNNSLFNKRRKPQWVNKMISEKSETIINLKDDSKSSDYGNDCVVAPSIIGENYQDLQNKVEKFLTELISQINKKYCECPTCKGWGIVEGE

SEQ ID NO: 736 - protein, 304 aa, synthetic construct
  REGION 1..304: note = GAD1 homologous AA sequence
MYSKENPLKLKVINCKNYIYIANEDYYGVTDLTRYLFDGEVPEKTNKDRWFKLNSIPKVVSAKQEDKRINVRYELKAGYTATELMPQIITQEMKQSEEYDEVIGLYNYKYDTIPGEYEPIEFEIKEIYARKDFEFVPNKYHAKTDLITQIEYPEEAYQDKPCKLDSDEMLQIIRNYVKANIDTNVADITSDYDFHFEVVKKIVLADPYNILVDTNNSLFNKRKRKPNWVNRMISQKKETIINFKNASTSTDYGKDCVVAPSIVGENYKDLQNKVEKFLTELMSQINKKYCECPTCKGWGIVEGE

SEQ ID NO: 737 - protein, 303 aa, synthetic construct
  REGION 1..303: note = GAD1 homologous AA sequence
MYSKENPLKLKVINCKNYIYIANENYYGVTDLTRYLFDGEVPEKTNKDRWFKLNSIPKVVAAKQEDKRINVRYELKAGYTATELMPQIITQEMEQSEEYDEVIGLYNYKYDTIPGEYEPIEFEIKEIYSRENFEFVPNKYNAKTDLLTQIEYPEEAYQDKPCKLDCDEMLKIIRNYVKANIDTNVADITSDYDFHFEVKKKIALADPYNILIDTNNNLFSKRKRKPKWVNRMISHKTETIIDFKNSTSTDFGKDCVKAPSIIGENYQDLQNKVDKFLTELMSQINKKYCECPTCKGWGIIEGE

SEQ ID NO: 738 - DNA, 363 bp, synthetic construct
  misc_feature 1..363: note = DSAD1 NA sequence
  source 1..363: mol_type = other DNA
atgattgaaatttttaaagatacaggagctacccatgatttagtttatcattctaagattaacacgtttgtttgggatgtggaatttgacattgttttatcagacagtaaggaattaaataaatgttattttgtgaaatgctttaatccgtatcgaataaatggaaagtgtgattttgcggttagttcaatagatatattttccgaaggtaaacgtctcttaattgaaaatgaattcaattttaaaattacaaaggcagtccacgtggcaacatcaaaagacgtaactgaaatagttttgcatttaagtgagagaatcagtagtccatttccaattgtaaaagaagttgtttatctagattaa

SEQ ID NO: 739 - protein, 120 aa, synthetic construct
  REGION 1..120: note = DSAD1 AA sequence
MIEIFKDTGATHDLVYHSKINTFVWDVEFDIVLSDSKELNKCYFVKCFNPYRINGKCDFAVSSIDIFSEGKRLLIENEFNFKITKAVHVATSKDVTEIVLHLSERISSPFPIVKEVVYLD

SEQ ID NO: 740 - DNA, 3223 bp, synthetic construct
  misc_feature 1..3223: note = Cloned Gabija NA sequence
  source 1..3223: mol_type = other DNA
atgaaattcagtaatattacaataaagaacttcaggaattttgaaaaagtaaatataaatttagataataaaaatgtgattttcgggatgaatgatattggaaaaacaaattttttatatgcattgagatttcttttagataaagagataagaaaattcggttttaataaatctgattatcataaacatgacacttctaaaaaaattgaaattattttaacacttgatttgtctaattatgaaaaggatgaagatacaaaaaaacttatttcagtggttaagggtgctagaacatcggcaaatgcagatgttttttatatcgcactagaatctaaatatgatgataaagaattatatgggaacataattttaaaatggggatcggaactagataatttaatagatataccagggagagggaacataaacgcgttagataatgtatttaaggtgatttatataaatccgcttgttgatttagacaaattgttcgcacaaaataaaaaatatatttttgaagagtcacagggtaatgaatcagatgaagggattttaaataatattaaatctttaacagatcaagtaaatcaacaaataggagaaatgacaattattaagggtttccagcaagagataacaagtgaatataggtctttaaaaaaagaagaggtttctattgagctgaagtccgaaatggcaattaaaggatttttctcagatattattccatatataaaaaaagacggtgattctaattactatccaacctcaggggatggtagaagaaaaatgctttcttactctatatataactatctggctaagaaaaaatatgaggataaaattgttatttatttaattgaggaacccgaaattagtctacatagatcaatgcaaattgctttatcaaaacagttatttgaacaatctacatataaatattttttcttatccactcactctcctgaacttctttatgaaatggataatacaagattaataagagtgcattcaactgaaaaggttgtatgttcttcccatatgtataatgtggaagaagcctatggaagtgtcaagaaaaagctaaataaagctttatcatcggctctatttgctgaaagagtacttttaatagaaggtccttcagaaaaaatattatttgaaaaggttttagacgaagtagaaccagaatatgaattaaatggaggtttcttgcttgaagtaggagggacgtactttaatcattatgtgtgtacattaaatgatttaggtataacccatataattaaaacagataatgatttgaaatcaaaaaaaggtaaaaaaggtgtatacgaattactaggattaaatagatgcttaaacttattaggacgtgaaaatctagatgagattactattgacatccctgaagatataaaaggtaagaagaaaaaagagagacttaatgaaagaaaaaaagagatttttaaacaatataaaaatgaggtaggggaattcttaggggaacgaatatatttatcggaaatcgatctggaaaatgatttatattctgcaattggtgaaagcatgaaaagaatttttgaaaacgaagatcccgtgcactatttacagaaaagtaaactatttaacatggtcgagctagtaaataatttaagtactaaagattgttttgatgtttttgagcacgaaaaatttgcatgcctaaaggagttggtgggtagtgatagaggatgaaatgtctagagaacaaataataaaggatgggggtaatattcttgttaccgctggagcaggttcgggtaaaacaacaatattagttagtaaaattgaagctgatttaaaagaaaataaaactcattactcaattgcagctgttacttttacaaataaggcagcaaaagaaatcgagggaagattagggtattcatcaagagggaattttattggcactaacgatggttttgtcgagtctgaaattattaggccgtttattaaagatgcatttggaaatgattatccagacaatttcactgctgaatattttgataaccaatttgcttcatacgataagggattgcaagtgctaaaatatcaaaatatattagggacttatagtaatcctaaaaagaattttaagtttcaattggctttagatattttaaaaaaatcacttgtcgctagacaatatatattttcaaaatacttcaagatatttatagacgagtaccaagattcggataaggatatgcataatttatttatgtatttaaaggatcagcttaaaattaagttatttattgttggtgacccaaaacaatctatttatatctggaggggagcagaacctgaaaattttaatggtcttatagaaaattctacggattttaataaatatcatttaacttccaactttcgatgctgtcaggatattcaaaattactctaatttatttaatgaagaaactagaagcttaattaaagaaaaaaatgaggttcaaaatgtaatcagtatagcagacgatatgccaatttcagatattttattaaaattaacagaagaaaagcaggtattaaacatagaagcggaattagtgattttagtccggagacgtaatcaagccattgaaataatgaaagaactaaatgaagaagggtttaattttatttttattccccaaaccccattagatagggcaactccaaatgcaactcttttaaaagaggtaattaaatatgttaaaaatgatagatattcaatatatgatttagctgctgaaattgtaggtaatctaagttcacgagaaattaaggagatacaaaaaataattaatgaattactagtacctaatattaatcaggtactaattaatcaggtattaattaatttatttgctaaattagaaattactttagatactagagaaattacagcatttacagaagtaatgatgacgaatgaatttgacatagcatttgatacaaatgaatatttacataaaatatttactgtacattctgcaaaaggattagaatttaatcaagtcattattactgcaagtgattacaatgtacactataatagagatactaacgaacattatgttgctacaactagagcaaaagataaattaattgtcattatggataataagaagtactcagattatattgagacgctaatgaaagaacttaaaattaaaaatattattaagtcaatataa

SEQ ID NO: 741 - DNA, 2042 bp, synthetic construct
  misc_feature 1..2042: note = Cloned Thoeris NA sequence
  source 1..2042: mol_type = other DNA
atgaatccaatagttgaactatttattaaagattttacaaaagaagttatggaagagaatgctgcaatttttgcaggagcgggtttatcaatgtctgttgggtatgttagttgggcgaagttattggagcctattgctcaagaaattggattagatgtaaataaagaaaatgatttagtaagcttggcgcaatattattgtaatgagaatcagggtaatagaggtagaattaatcaaattatcctagatgaattttctcgaaaagtagatttaactgaaaatcacaaaattttagctcgattaccaattcatacttattggacgacaaattatgataggttaattgaaaaggcattagaagaagaaaataagattgctgatgtaaagtatacggtaaaacaattagctactacaaaggtaaaaagagatgcagttgtatataaaatgcatggagacgtggaacatccctctgaggcagttttgattaaagatgattatgaaaagtattctataaaaatggatccgtatattaaggcgttgagtggggatctagtttctaagacatttttatttgttggatttagttttactgatcccaatctagattatatattaagtcgagtaaggagtgcttatgaaagggatcaaagaagacactattgtttaataaaaaaagaagagcgaagaccagatgaattagaggcggattttgagtatagagtaagaaaacaggaattatttattagtgatttatcacgttttaatataaagactattgtacttaataattacaatgagattaccgagatattacaacgaattgaaaataatataaaaactaaaacagtatttttatctggtagtgcggttgaatataatcattgggagacagaacatgctgaacaattcattcatcagttaagtaaagaattaattagaaaggattttaatatagtatctggttttggacttggtgtagggagttttgttatcaatggagttctagaagaattgtatatgaaccagggaactatagatgatgatagacttattctaagaccgtttccacaggggaaaaagggcgaagagcaatgggataaatatagacgagatatgattacaagaactggggtaagcatctttttatatggaaataaaatagacaagggacaggttgttaaggctaagggtgtccaatctgaatttaatatttcttttgaacaaaataattacgttgttccggtaggtgcaactggttatattgcaaaagatttatggaataaagtaaatgaggaatttgaaacgtattacccaggtgctgatgcaaggatgaaaaaattgttcggagaattgaataatgaagcattatcaatagaggaactgattaacactataatagagtttgtagaaatcctatccaactaatcattactgattattaatcagagaggaactgttaaattatggcgaaaagagttttttttagtttccattatcaagatgtaattgattttagagtaaatgttgtaagaaatcattgggtaacaaaattaaatcaaagtgctgcgggggtctttgatgcatctctttgggaagatgcaaaaaaaacaagtgatatagcacttaaaagattaataaatggcgggctaaacaatacctcagttacatgtgttttaattggatctcagacttttaatagaagatgggtgagatatgaaattatgaaaagtatagaaaaaggaaataagataataggaattcatattaatgcttttaaagataaatatggaaatattaaaagtaaagggcctaatcctttcgattatttagggtatcaatatagttcagacggcaaacagttacatttgtatgagtggacagggggaaaatgggaggaatataaggatttggcaccatatagggtgaatcaaattgctccagaatcacttagaggaaaattctatagtttgtcatcggtttatcgtgtgtatgattgggttgctgatgatggatataacaaattttcctcttgggtgaactaa

SEQ ID NO: 742 - DNA, 4168 bp, synthetic construct
  misc_feature 1..4168: note = Cloned Hachimen NA sequence
  source 1..4168: mol_type = other DNA
atgactatacaagatgatatggttggaaaacatcctatcgagaatgatttttggaaatggttgcagcatgaagatacagaatcctcggatttaaaacggcatcgttacttagaagtggattctagtaatcgtgatgaagctattaaatctgttgcagcttggctaattaagtatcatttgtcggaaggtaaaaagagagtgataagaaaaaaacaagaaatacttgaaaaacatgattttgctgaatatgcacaatcgcttcatgtttttcctaaaagtgataaaacacagaaaggaaatttaggagaaatatttttatcggaatatttgagtcagacatcaggagttcaaatcctagtgtataaattacactacaaccccaacatagatcaatcgatgaaaggggatgacgttttacttgttaacccagataaagttttattaggagaaagtaaatttcgttctactccaaataaacgtgctgttgaagaggcttctgaacttatgaaagataagttaactttgcctatgtctcttggttttattgcagatagattatttgaacaaggaaaagatgaattaggtgaagtgattttcgatcttcaatttaagatgagtagtatagaaatagatattaaaaatatagggtttttattatctactaaaaaggttcgtagtatcgtagaaaataacctttcttctccaaattctgattttatttttatttcattaggaatggatgacccagcagcttttttgaaaagtgtatttgactatgcagaaagtaatcttctggagggatcttatgaaacttgaaacagcatataattattttgaaaagcttgaaaaagatgaacgtcttcaaaactatatttcacaggctaattcaagatatatcctttacatagcaaatgaaccattggaaaatttcccacattacactgtaaatctagatgaaaaatgtacacatatagcatttagttatctcaattgtggatggcgcttttttttagagaaaatcagtgatgaagctacaaaatgtatggaaaaggcttctgaaatattggagtatttgtatgcctatagtgattgcgaaaagttatataaagagtattaccgtttagtatgctcattagcgtattatatatctgcacagtattctaaatcttttattatcttggggaaatataattctgattcatatatagggaaaataacaaaattatttttaactagaaactttatagaattagaaaggcaactggaaattaagtacttgaagaacgatgaagaaacttcaagtgagaataaggataacataatatatgaaaaaattttatctaatgcatttttacatataattaattttattcgcacagggaagatggaatctttggaaagttctaaagatatggttcgagatttaattactttggctgatataaataatgaaccacatatgtggtggtactttagactactatatttggtttttgaagaatatgaagatgggtctttgtggaaagtggttccaccgcttttagataatgatgatatatcagctaaatatatttatgctaatttatacaaaaagaagccaataactgaattttttaagtcgcaaagggaatgtttggacggagagttattaaagaacgatggtttcgtaattggaatgcctactagttcaggaaaaacaaaggttgctgaagtaacaatattaaaaactttaactaaatctccaggtgcactttgtatttatattgcaccttatcgatctttggctaatgaagtggaatttagcctatctagtatgtttgagattatgggttatcaggtttcgcagttatatgggggatctcaaacgtctccgctggatcggcaattgactaagcaagctaatgtcataattgttactccggaaaaagctaaatcgatgttgagatctaataaagacttaaaggatagaattcaacttgtaatcattgatgaaggtcatttagtcgggtttcagccaagatatattacaggagaattgcttattgaagaactaaagattgttttgaaaaaaaataatggtcaacttgtactactatctgctgttcttcctaatatttctgatttttctttgtggattggtgaggatgataaagctaaaagaatgtctgtctggagaccatcaagtcaaagatttggagaattatctttagcaagaaatactgtgaatataaattgggagggagaaacaccatcatataataagaactttataacaccaaaattagtaaaaccagaacggattacaaaaacaggaaggaaatatgcagctaaatattttccagcagataaaaaagaaggtgttgctgcaaccgcaacaaaaatgctagatgtgggatccgttttgatttatgtaggaagatcgaatatggtattgtctcaagctaggattgtttcgaaactctttgaggaaaagggaatagaacatgagtggaggaataaaaacgattggttgtttgtggaattagcttgtatagaagaatatggggaagattcagaaatattatctttattaaaacaaggtatagtaccccatagttctaaattaccaacagaagtacgtcagagcatagagaaattaatggctaatgataatcctaagataataattgcgacatccacacttggacaaggggttaatattggtgtttcgacagttattgtatctaatgttcgtttagatgagagtaatactgtaaaagtaaatgatttttggaatattgctggtagagcggggagggcatttacagatacagagggtaaaattctatacgcaattgatagaaataaaagccagtggtctatttataatcaaattcaaatgaaagaaatgtatttcaaatatagaaatattgaaaaagctacaagtggtctctatcttcttcttcgttatctatttatattatcggaagaattcgagatagaatacagcttatttttagaacttctagcagaaaatagagaatccattgatgaacagaaagctgtggagtttttttctgaggcagatcagttccttgagttattagatgatactctaatttccatggatattatgaatgaggcaaacgttttggaaaattcctcttcttggatagacgatgtctttcgttcttcgctagcttttattcaagcaaaacaagatcaatcattttctgaagaaaaaatgattgaaatcttaaaagcaagaaattcaggtgtaataaagttggctggagaagaaacaaaatggcattcaatagcatcatcaagtgtaccattgagagcaagtcttgtaattgaacataggatagatgagctactaaagtatgtacgaaaatacattgactcagataagagttttgaagagttattatctcttgtgatggaacttgatatatttattgatagtctaccgatatctaaaatagaaggaatagaaataggtgctaatttttctgaaattcgtgagggatggtttagtggtactagcatacacatattggaaaaaaggcacgaaaatgtaagaagtatctgtaatgaatattattcttttcattttccttggattgtaaatgcgatagctcaaaagatcaaattaattgattgccaagaggaatcaaaggtgttggagcaaatttctttatttgctgaaatagggttaaacaataataaaagtgtaaaaatctatttggcaggtataaagtcaagaaattgtgccactgaattatctgagaaaataggcatggataatgatttggtgacgcctgttaaggagctacttctagagtttttcaatttatgtgtagtgaaaaaagaggattgttcagaaatttgtttcaattggttaaagcttttaaatgatgaaaaagaagctaaagagtatgtaaaggtaaaaagacggtctttccaatttaatattccttttgatttacatgacaatcttttatatataaagaaagtacagagtgaaatatggctgtgctcatttgattataaaattaaaattcctgtattaaaagagaaggcgttatttaatgagtgctcggatatacctgatattttcttgagaaaggaaaaaggagatgtctggattttagattctcataatccttatattattttttattaa

SEQ ID NO: 743 - DNA, 1961 bp, synthetic construct
  misc_feature 1..1961: note = Cloned Septu NA sequence
  source 1..1961: mol_type = other DNA
atgttagttataaaagaattaaaaattgatgggattggcggtattaatagccttaaacttaattttaacgaggggttaaatttgatttgcggtccaaatggtgtagggaaaaccacaattcttgaaagtattggccatatgtttagtaatggtagtcgtagtaaggttaagagaaatgttaaatttgatcaggggagttgtgaaattagctattcaacattcctagatactatacatacacagtcatgtattttaaggaattatgaagaaaatgattcgctggattggcatggtggaaatgcaaatttggctaaagaggtcattgtcttcaaagctcaaagatcattcacttatacgcaattagattctcttcgtaaagatacggaaacaagtgatggtaaatttctggatgattctatgaatggaattcaatttttcgactttaagaattggtttatccatcgttttttatttagtcatgtagataatgaattaacaacagtacaaaaagagaattttaaacttgcgacagattgttttggtattttagataatagcattcgttttagtagtgttaaaagtgatacattcgatataattataagtacctcaaatggtgaaatctattttgagtatctatcatcaggattcaaatcatgtatctatattattcatgggttaattaaagaaatagagtatcgttttaaaaacgatggtggtattaaagttcaagattatgaagggctaatactaatcgatgagttggaccttcatttacatccacagtggcaagcgaaaatgatttatttaataaagcatatattacctaaagctcaaattattgcaacaacacatagtcctcatatggtacaagctgcagcaattaatgaacttatagctttaggaatcgatgaagatgcggatgtatatgtaagacaactacctaatgttcaatatggatttcagggatggactgttgaggaaatattggaagacgttatggggttagatgaaacacggtctccaatgtacatagaggctataactgaatttgaaaaatctctagatgaagaaaatgaggagaagatatttgaagcttattataagttagatttaatgctacacccaagtaatccacttcgcaagttgttaaagttacaagtagctcaattcgggagggttatagagtgattcatttaaaacgccctaatagtcctagtaaacttataaatgaagaagcaaaactaactcaagaatttcttcaaaatggtaatagtgtttggggaaagccttatattaagcttgctcttctagagatgtcaaataacaaatgtgtatactgtgaatgtagactagatgaagagagtaagtatatggaggtagagcactttctaccaaaagatacttatcctaatctagttgtcaattggagaaatttattaccaagttgtaaaagatgtaatggaaaaaaagggacacatgattcaaaaaaagaacctattatcaatcctactgttgatactccaagtaatcatataaaaatgtttaactattgcctaaagggaaaagatttaaaagggaaaacaacagttgatgtattgcacctaaaccaacttgatagattagtatacccaagaatgttaattggaacaaaaactatagaaacagtagaaaaacttttagaaatggcagagaactttaatttgaatattaatgctactgggcgtatcaaaagtcgtattatacatggcactacacagttgctcatagaagctcaaccgcattccgaatattctgcgacagttgcctcggttttatttaacaatgaagattttgttaagttaaaagagattatgattaagtgcacaatctggaatacagaacatcaaaagttactgtctaatgcagaaagaaatattttggtagagccactttacaattgcctcaataataagaattaa

SEQ ID NO: 744 - DNA, 2642 bp, synthetic construct
  misc_feature 1..2642: note = Cloned Lamassu NA sequence
  source 1..2642: mol_type = other DNA
atgattgaaattgacaacgggggagccatcgcactaaaaggatttaactatcaaaaagcttccatcatacttgtaatgattcataattttgaaaaagataattttatagtcatacctgaatcgcaagaagattttgaaattcatcttggacaagatacttattttatacaagtgaaaggaacaaaaaaactttccataggtaagttgaagtcaaggcctagcggaaaagcttcaatcatagagaaaaatctttctcctggtaatgttggagatataaggaaaatatttctctgggatatagcggagttaacaaaaaacgaattgataagccaagaaggaacgcttattcctatgaaacacagcctttcattgaaacaaaagacagagattataaatactcttgatttagatgaagaacagaaaaatagaatgaacaatcaatatatatatataaccccttttccaaacgatataaatttggctttaacatttttaaaaggagaaatggttaatgaaaacttgctggtttctaacgatcgagctaaattagttttaggagaactatcattggaaatagatcgtaaaagtgaaatagtagtttctactgaaagtgatgtagaaaggaaaaaaatcgacgggaattatcttaagcaggtattcattaatattaagcaaaaagagatgtttgatgaaattttagataatctctctatcaacacaattatgaaaaaaaaagtaaagaaggagaaattaagaataccactcttgtatcaaaatattaaagagcaaacgaagcaaaaggcagatattaatttacttatgagggagaatgatgagggtgctattaactatctcagagatctattggtagagatagtgccagatatgaagcctacagaactatctattgctttagcaatagactgtttttgtgagttgggagaataaaatctatgataataattgctttttctattcttgattttaaaaataaagaagcacaaaattttgactttaaagctgggactaatctaattgttagtaaaggaaataccaaaggtaaatcaagtcttttaaaatcaatgtattatacattaggatttgatgtgcatcaatttcctagtaactggaacataaattttatgtatttccaaatagaagtcttaataaataatgttaaatataatataactagacaaaaaaatatttttagagtaagtgatgtagaagtacctttgaatgtaaaagagtattcagagtggcttcaacataaacttgagattaaaatgcagttagctaatactcatactaagcacttatacgaggcatattcttcggcagtaattttaccattttacatagatcaagacgattcttgggatggcggaatttatagaaatgtaactaatactctgaatcaatatactcgcataccggcagatattttcaaaagtgtttttaatctctccaattacgaacttctggagttgcaaaattcgcttactaattatagtaaagaaaagaatacggtagtgtctacaataaagagtttattaaatgttttggaagattatagacatgaaaacgcagatgtccctactgtttcaaaaattgataaaatagccttaaataaagatatcgatcgctacttgcagatgcaaaatgaattaaatgaacaaatagtaaaatataaaatgaagctattaaacaagcaagaaatgttggatttacaaaagcaagaattgtctgaattagagcagcttttaaaaatgaacaaaaagagatataactctattgaaacagaatgtcaatattgtcattctaaattaacaaaagaacaatctttaacaagacttgatttatcgaataattattttgaaatatcgcttttgaaagaggaaatagaaaaagaagtagtaaaattgactaatgaaattataatattcgaatcacaacaaaattctattgaatctaaaattgatgaaattcatcgtaggattcaaaattctaaagatctacttacgattgatgattatgtaaaagcaactgctaaaaaagaagcatcaaatgaattggaaagtttagttgataaacaagttctttctaaatataatttagaagaaaaaattaaagtattaagaagggaaattaataaactgaagaaagagaaagaaagtttaagagagattattgagcgagattacactgatttggtatttgaaataaaaaaagtgttgaatgatttaaatgatacaaagctggatttatctgaattaaatctggatgaacttaaatttcttgaatttaagaaaatatcggggagtggtatggataaaaataaaaaatttttagcttactatttaatttattttagtttgttgagaaagtatagctcttatataattcccttttgtatggattcgtttattaaaaatgaaattacgggtgagactgcaaaaaagatgtttgaagcaatagaaaaatatttttttgacactaatcagtctttcttttcaatcgtttctgaaaaccttaaacatttagagtttgtagatagttacaataagattaatgttgagggtaagctgttggttagagataaatatgatgagattgctttgaaattcaaatttgatagttaa

SEQ ID NO: 745 - DNA, 1143 bp, synthetic construct
  misc_feature 1..1143: note = Cloned Shedu NA sequence
  source 1..1143: mol_type = other DNA
atgagtgacaaaattaatgtatggacaacatcaagagactctgctgtatgtggtgacattgaattaaaaaaaacatctactactagacttatttttaggcctgaaatagtgaacaataataaaaatcctaaggcatctgttagaggatgctttatctttcaaaagaaaggtagaaatgccctttgggatgattataaggaattagatatgaataagttaaaagcagaggaatggattaaactagagataaactctgatgctatgctgactcttactaaagaaattcagaagcattatgcagtgcatgaaaagtatggggttaggtatggagcatttcaccttttcaaggataaccctgatatcgagaaactgattgaaatgtttgagagtaacactgatttgcttactcaattaatggaggatgacaagagtgaagctctagagaaaacattagaatggattgttacaaatgataatccagataaaataattgacaggcttaaaaatctaaaagagcaagatttagaccaacttaatactcttattgggatagctaatctaaaaaaggtattgtctgtttgggaaagcaacaaactcactaatacctctgagaagttttggcaaagtgtcttaaaagaaaacacttggattttgagtcagattttctctaacccgactgttttgataaatgatgaagcctatgtaggcggaaagactgtcaaaaatgatagtggtaagttagtagatttcttatatgcaaaccctttctcaaaagatgctgtacttattgagattaagactccatcaacgcctctaattactcccactgaatacagaacaggagtatattccgcacataaagacttgacaggagcagttacgcaagtgttgacttataagacaaccctacagagggagtatcagaatatagactataacaattatagacagggaatcaaaactgattttgacattattactccttgttgtgttgttatagcaggcatgtttgatacattaactgatacagctcatagacattcctttgaactgtacagaaaagagttaaaaaatgtaactgtaattacttttgatgaactgtttgaaagggttaaggggttaatcaagctattggaaggataa

SEQ ID NO: 746 - DNA, 3018 bp, synthetic construct
  misc_feature 1..3018: note = Cloned DSR2 NA sequence
  source 1..3018: mol_type = other DNA
atggtgaaggtggatttggaaagtaaaaggtacggagaaaaattaaaagaggtgtttctcatgttggacaataatgtagttgaatgtataaaagaaatcacagaatcctcaaggaatggaaaacttgtcttttttgttggcgcgggagtttcaacactttcagattatcctcaatggtggaggttggtagataagtatcatgaagagctctatgggagtccaaagaaaggaaactattcttctgatgaatatcttcgaattcctcaaatattttataatgtcaaaggtgaaatggcatttgatggtatactaaaagatttttttcaggtagataagcctacgaacccgatacatgacaagatattagctatgaacccagcacatgtaattacaactaattatgataatttgattgatactgcatgttggaagagagggaaatattttagtgtaataagtgctgaagaagacgttgctaatgctacttcatcaaggtatttactaaaggttcatggggattttagaaagggctttaaaggggaaaatgtagttttaaaggaagatgactatctgaattatgatcagaattatcctcttatcagtaatctcatgaagacaataattgcaacgcataccattgttttcataggttatggtttaggagattataatattaatatgttgttaaattgggtaagaaagttacaaaaggacagttttcataaaccgttttttattagaacagatccttcgcccattgaaaatgagactttaatctattacgaaaataaaggattacgaataattgatgcggctagcttgatagatagtaatgaatatgattatttagaacgttattcagcagtaatggatcttcttattgaatcacaagaaaataaatttatcactaaagatgacgaagtaattgattatatatacggaaaaataagcccattatttgcccttcagtatattcgtaaaattgatctcaaacatgtttttgaatacgattatcactttgaagtcaatggtactgttgttcggcataagaataagggatttggttacatggagcgtttttttgaattaaaagagagctgcgatgagagaagtaaactttccaaaaaacaatatgaaaggtttaatgctctttttaatttctttgagaagaatggagttatctgtatggcgaaagatgcaggtactctgaatacttcaatagagattaatagtttggcgtatcacggcaaatatgatgtaatgaagaaatttattgaagaacaatcggtaagtattgaggatgattataaaaaagcattttttcttgcgtgtttaggtaggtgggaggaatcctatgacctttattcaaatatcatcttaaattctatagatgagtcaaatgggtgtgtatattatctatcacaaataaatagatataggatctatcaatcaataacacaagctgtaacgcagtttaatggtcttggtttattaacatttgggaggcattataaaccatttactgatgaatttcttgctaggattgaaagagagatgacaaatttcaacattgatgatttgtttaatggtatgccatttgagtttcaaaagaaatataagatacttgagtttttaagtgataatcagtttctatatgacgatactgtaaaactttttgagttgactaataaagtgcgttctgaaatgagtgaaggatcttattcttttggaatgtcatctgatattgttgttcttcttcggctttatgataatttacggtttttatatgaaaattgcttatggtctgtttcttttcatgaatttcatcaatatatacgaaactcaatgagcctactaattgaaaaggctgaatatgagcgaacgagggatatagatgaattaggattctctttttttggaaaaaaatcaggtttttttatggaatattacgattttgttaatatatcgagacactttaaaattgatgacataaagaaccttgagagaagttgctcaattgataaaattaggtttggtgaacaggaaaaaatagaagaatacttagttggtatagcagaagaaattactaagcaattttctgctaatggaatgaacgtcgttttttatactcagtttatttcagaagcaaaggcagcactctattttgctaaatatgtaaaactatcggaagagggacttgggaaaatagtgaaagcattgttgttttattttcctgagagagatttggatataggaaaacgctatgtatggttagagagattaactaaatgtaatgaattacccaagtcaataatttcaattattgatgattttctagtgttacaggcagaaaaacatattgatcaaaattattcagaggtatcatcaaatggtttatattccagggactatggtgctttaattaagcattttgagaagaatttcatttcaaaaagactatcagaaattactttatgtttaacacaagataagcaaaaacaaattgattttttgtttaaattattacccttactttccactaatgcaaaaagtcatctattaagttttaaaagcgttgaaaatataaatgatttaatgaatggaattagaataggcttaattgatgagttcactccggagcatgaagaattaattattgaatatctggagacacgaaaagtaaattatattgttgaaaaggaaaagggaatacaaactttttcttctaacgactatatgagtacctttggtatatggtattttcttgaggaaataaataattcaaaaatggaagaatttattggaatggatgatcagtatgacttttttgtagacccagagaattttgattacaaaaagtttataccatcgtggctaaaaaattataatgataaattacttggtaaaatcgctggaaataaacatatgaaacatcatgtgattgaggtactaaaagaaagagttaaaaactcaaatgataagaggtatttggaaattttaatgaactactttatctaa

SEQ ID NO: 747 - DNA, 63 bp, synthetic construct
  misc_feature 1..63: note = primer AL_GAD1_A_F NA sequence
  source 1..63: mol_type = other DNA
tcaaaagcacatatcgtgtagaagggaacggttggagctacctaaggagggtgcttagatgac

SEQ ID NO: 748 - DNA, 58 bp, synthetic construct
  misc_feature 1..58: note = primer AL_GAD1_A_R NA sequence
  source 1..58: mol_type = other DNA
ggctgcaggaattcgagtcaaagaagctttaattactttaggagttaattcagattct

SEQ ID NO: 749 - DNA, 51 bp, synthetic construct
  misc_feature 1..51: note = primer AL_GAD1_B_F NA sequence
  source 1..51: mol_type = other DNA
aataaacccttgcataggggcaatataaaccctaagtttgcaagaatcacg

SEQ ID NO: 750 - DNA, 69 bp, synthetic construct
  misc_feature 1..69: note = primer AL_GAD1_B_R NA sequence
  source 1..69: mol_type = other DNA
cttccgggaacagtgacagagaacagcatgtcggcttcgtaatgatgtttgacattcagttaacccctt

SEQ ID NO: 751 - DNA, 40 bp, synthetic construct
  misc_feature 1..40: note = primer AL-SPEC_F NA sequence
  source 1..40: mol_type = other DNA
taaagtaattaaagcttctttgactcgaattcctgcagcc

SEQ ID NO: 752 - DNA, 51 bp, synthetic construct
  misc_feature 1..51: note = primer AL_spec_R NA sequence
  source 1..51: mol_type = other DNA
caaacttagggtttatattgcccctatgcaagggtttattgttttctaaaa

SEQ ID NO: 753 - protein, 1005 aa, synthetic construct
  REGION 1..1005: note = Cloned DSR2 AA sequence
MVKVDLESKRYGEKLKEVFLMLDNNVVECIKEITESSRNGKLVFFVGAGVSTLSDYPQWWRLVDKYHEELYGSPKKGNYSSDEYLRIPQIFYNVKGEMAFDGILKDFFQVDKPTNPIHDKILAMNPAHVITTNYDNLIDTACWKRGKYFSVISAEEDVANATSSRYLLKVHGDFRKGFKGENVVLKEDDYLNYDQNYPLISNLMKTIIATHTIVFIGYGLGDYNINMLLNWVRKLQKDSFHKPFFIRTDPSPIENETLIYYENKGLRIIDAASLIDSNEYDYLERYSAVMDLLIESQENKFITKDDEVIDYIYGKISPLFALQYIRKIDLKHVFEYDYHFEVNGTVVRHKNKGFGYMERFFELKESCDERSKLSKKQYERFNALFNFFEKNGVICMAKDAGTLNTSIEINSLAYHGKYDVMKKFIEEQSVSIEDDYKKAFFLACLGRWEESYDLYSNIILNSIDESNGCVYYLSQINRYRIYQSITQAVTQFNGLGLLTFGRHYKPFTDEFLARIEREMTNFNIDDLFNGMPFEFQKKYKILEFLSDNQFLYDDTVKLFELTNKVRSEMSEGSYSFGMSSDIVVLLRLYDNLRFLYENCLWSVSFHEFHQYIRNSMSLLIEKAEYERTRDIDELGFSFFGKKSGFFMEYYDFVNISRHFKIDDIKNLERSCSIDKIRFGEQEKIEEYLVGIAEEITKQFSANGMNVVFYTQFISEAKAALYFAKYVKLSEEGLGKIVKALLFYFPERDLDIGKRYVWLERLTKCNELPKSIISIIDDFLVLQAEKHIDQNYSEVSSNGLYSRDYGALIKHFEKNFISKRLSEITLCLTQDKQKQIDFLFKLLPLLSTNAKSHLLSFKSVENINDLMNGIRIGLIDEFTPEHEELIIEYLETRKVNYIVEKEKGIQTFSSNDYMSTFGIWYFLEEINNSKMEEFIGMDDQYDFFVDPENFDYKKFIPSWLKNYNDKLLGKIAGNKHMKHHVIEVLKERVKNSNDKRYLEILMNYFI

SEQ ID NO: 754 - DNA, 19 bp, synthetic construct
  misc_feature 1..19: note = gRNA to target TAD1
  source 1..19: mol_type = other DNA
ggaaccactacgaaatgat

SEQ ID NO: 755 - DNA, 20 bp, synthetic construct
  misc_feature 1..20: note = gRNA to target TAD1
  source 1..20: mol_type = other DNA
gcttgctaggattagtgtcc

SEQ ID NO: 756 - DNA, 20 bp, synthetic construct
  misc_feature 1..20: note = Control gRNA
  source 1..20: mol_type = other DNA
ctatgattgatttttttagc

SEQ ID NO: 757 - DNA, 270 bp, synthetic construct
  misc_feature 1..270: note = NA sequence of anti-defense homologs identified (more details in the specs)
  source 1..270: mol_type = other DNA
atgaaaactaaaatgagtttcggagaagcattagaggttcttaagcaaggtatgcaagtatataggtctgggtggaatggtaagaacatgttcctattccttaagagttctgatgcactagcttctgattttggatttggatttggagagtatattaatgaacccgtgtttgggaacatcatctttatcaagacagcagataacaaaatacatgcctgggtgccttctcaaacagacgttctagcagaggattgggacattgtatcatag

SEQ ID NO: 758 - DNA, 246 bp, synthetic construct
  misc_feature 1..246: note = NA sequence of anti-defense homologs identified (more details in the specs)
  source 1..246: mol_type = other DNA
atgaatttcggaaaagcaatcgaagcaatgaaagaaggtagggctgttcgccgcaagggatggaacggcaaggggattttcatcaagatccaaagcccagatgaaaacagttttatgtctcactcatatatctacatcgacacaaccgggcttaagactgacaaccccgacgctcctaaaaatcgtgtgccttggcttgcaagtcagactgacatgctggctgaagactgggttctggcggagtaa

SEQ ID NO: 759 - DNA, 252 bp, synthetic construct
  misc_feature 1..252: note = NA sequence of anti-defense homologs identified (more details in the specs)
  source 1..252: mol_type = other DNA
atgaaagaaatgacattcggcggtgcattggaagcactgaaagccggaaagaaagttgccagaaccggttggaacggcaaaggaatgtatttgtaccttgctgacggcaaattactgacgcaggaaatcggtgacggaagttatccgtttacggacagcattgtcatgaaaaccgcagataaccgatattgcattggctggctggctagtcagaccgatatgctggcggaagattggtgcattgtcaaatag

SEQ ID NO: 760 - DNA, 279 bp, synthetic construct
  misc_feature 1..279: note = NA sequence of anti-defense homologs identified (more details in the specs)
  source 1..279: mol_type = other DNA
atgaggataaataacatgaattttggggaagcgctcgaggcattgaaactgggacagaaggttgcccgagaaggctggaatgggaaagggatgttcctgttcctggtgcccggcagcgttttcaacgtaagccggccaccgttgctgggcatttatccggcgggtacggagatcagatatcgcccgcatgtcgatatgaaaaccgcccagggtgacgtggtgccctggctgtgctcgcaaaccgatatgctggctgaagactggggcatcgtgcattga

SEQ ID NO: 761 - DNA, 480 bp, synthetic construct
  misc_feature 1..480: note = NA sequence of anti-defense homologs identified (more details in the specs)
  source 1..480: mol_type = other DNA
atgacccagcatattggcgtaaaactgattaacgcctttccgatgacgagacaggcatataacgattttcgtggctggcagcttcctgccggagaaaacggcgaggacgaaggctatctggttgaatatctggatggcggaaaacctaacaccgatcgctttgatggctacgttagctggagtccaaaagaagtattcgaaaaggcttatcgtcctgtatcaggactaagtttcggtctggccatggaagcgttaaaacagggcaaaagtttgcagcgggtaggatggaatgggaaagaccagtttgtttatctcgtgaaaggggaaaaattagcgtctgcgttgggttatggctttggcgaatatgttggcgagccaactttcaatgacacgcttgtattgaaaaactcacagaaccgccttgctacatgggttccatccattggcgacctgatggctgaagactggcaaatcatttaa

SEQ ID NO: 762 - DNA, 267 bp, synthetic construct
  misc_feature 1..267: note = NA sequence of anti-defense homologs identified (more details in the specs)
  source 1..267: mol_type = other DNA
atggatagtttaaattttggaaaagctttagaagcattaaaagaaggaaaaaaagtatcaagagaaggatggaacggaaaaggcatgtttgcttattatgttcctggaggtgtttataaatctcaaacagatgtaattaaaaatacatttggagaagaagttaagtatagaccttacttggccttaaaaactgttgataatgacattgctacttggactcctagtgtaagtgatattctcgcagaagactggaatattgtggaataa

SEQ ID NO: 763 - DNA, 444 bp, synthetic construct
  misc_feature 1..444: note = NA sequence of anti-defense homologs identified (more details in the specs)
  source 1..444: mol_type = other DNA
atgaccaaggactattacgggacgaagcggatcaccgcatggcctgaagatcgcgacggcaagcccggttatgccgtcaaatacgcggacggctatatcagctggtcacccgctgatgttttcgaagctgcttaccagcctgtgaccggaatgagcttcgggcacgcgcttcaggcgctgaaagaagggcaccgggtcgcgcgagcgggttggaacggcaaaggcatgtgggtggctttgacccccggctcttccttcgctgcggcctgcgcaaagccgggacacgccgcgtttcatcgcgcctgcgaaatggaggatcagcaccaatcggtgaacctgttgcctcacttggatatgcgcgccgctgacggaagtatggtaatcggttggctcgcctcgcaaaccgacatgctggccgacgactggcaaatcgtggagggctga

SEQ ID NO: 764 - DNA, 408 bp, synthetic construct
  misc_feature 1..408: note = NA sequence of anti-defense homologs identified (more details in the specs)
  source 1..408: mol_type = other DNA
atggttcacagcaaatacgggtacgagccgcctgaatgggtgcaggctgatgcccggctagataagtggtacaaggataagcgtcgtgcaaataagcatggcgcttttagtttggaaaaaaataaggaggaagcaattatgaattttggtgaagcaattaaggcgttgaaattgggtaagcgtgttgcacgtaaaggttggaacggcaaaggcatcttcattaaattgaaaaagggagaatctttgaacactcccaataatcgttttaatgaggttatgactcacgatttcatttatattgacacgactgggctacgcacgaacaatccgaatgcacctatggatcgagttccatggttagctagtcaaactgatatgctagctgatgactgggtcgtagtcgaataa

SEQ ID NO: 765 - DNA, 273 bp, synthetic construct
  misc_feature 1..273: note = NA sequence of anti-defense homologs identified (more details in the specs)
  source 1..273: mol_type = other DNA
atgaattttggaaaagctttagaagcattaaaacaaggtaagaaagtatcaagagaaggatggaacggacaaggaatgtttgctgttttgcaaaaaggttatcctgatggcattccatgtaataagcaaactgctgaagcttggggattgaaagaaggtgatttatttaaagtcagaccttattttcaattgagaactgctcaaggcgatcatgctatgtgggttccgagtggaagtgatattctatcagaagattggattatcatcgattaa

SEQ ID NO: 766 - DNA, 285 bp, synthetic construct
  misc_feature 1..285: note = NA sequence of anti-defense homologs identified (more details in the specs)
  source 1..285: mol_type = other DNA
atgggtggtatttacaatttttccgaggctttggaactcctgaaagaaggatatcggctagctcgtgaaggctggaatggcaaggggatgtttgtgtgcttgcaggcgggctatccagagggggttgcaattaaccaaaacaccgctgatgccactggcctgcccgtgggaacagtctgcgtgtttagaccctatttgatgatgttcacggcggatcgtcagtttgtgccgtgggttgcatcgcagtctgatttgctggccgaggattgggtgctcgcagaatga

SEQ ID NO: 767 - DNA, 456 bp, synthetic construct
  misc_feature 1..456: note = NA sequence of anti-defense homologs identified (more details in the specs)
  source 1..456: mol_type = other DNA
atgtcaaaagtaaaaataatatctgatggagtaaaaactagggtctttatagatgataagccaataacaagagttacgtctttgaagctatctcaaagtgctatggaagctccaaaacttactttagagatagctcctaaaagtcttgaaattgacggtaaggatataccaattgaattcagtgaagatgtgagtgttaaaaatagtttcggctatgcactggaattattaaagcatggtaaagccgttaagcgtaggggatggaatggtaaaaatatgtttttatcctatgtaacagctgcagaatggaatccaaagcaccgtaatttactactgggttggttaaaattagggtttatagcaataaaaacagcagatgattacgtagtaccttggcaaccaagccaagccgatatgttaacagaagattgggaagaagtagagctttggaaataa

SEQ ID NO: 768 - DNA, 501 bp, synthetic construct
  misc_feature 1..501: note = NA sequence of anti-defense homologs identified (more details in the specs)
  source 1..501: mol_type = other DNA
atgaaaaagtatataggaacaaaacagattgaagccgaacctatgacattgggtgaagcttacagtaaaggcttggtaaaaagtgaaatagaagagaatgagtcttataaactgggatatcacactcgtactgaatatggctatgaaagttggtcacccaaagaactgtttgaagaatcatatcgagaagtcaaggaagaaactcctatctgtttcggtgatgctatagaagttttgaaacaaggtggcgctatccgtagaaagggctggaacggcaaagggttatttgttatcaagcaaattccggctcatatagaaagcgacattatccccaagatgcaatctcttccgcaatcagcaaaagaccttattctgaaaggcaaaggattcattgactatacaagccagtgtcttatctacaatgagaataccggacgcgctgattcatgggttccgtctatcagtgacgtgtttgccgaagattgggagattgtgaaatga

SEQ ID NO: 769 - DNA, 246 bp, synthetic construct
  misc_feature 1..246: note = NA sequence of anti-defense homologs identified (more details in the specs)
  source 1..246: mol_type = other DNA
atgaacttcggacaagcactagaagcattgaaggcaggtaagaaagtagctcgtggtggctggaacggcaaggggatctttatcgaactccaacgaccggatgctcatagtaaaatgacgcacccctatatcttcatcgacacgaccggcctgcagacagacaatccgcaggctcctaagtcgcgcgtgccttggttggcatcgcagactgacatgcttgccgaggattggggtgttgtcgaatga

SEQ ID NO: 770 - DNA, 297 bp, synthetic construct
  misc_feature 1..297: note = NA sequence of anti-defense homologs identified (more details in the specs)
  source 1..297: mol_type = other DNA
atgcatacgtattcggtggctcttgatgccgtcaaagtgggtaagcgcattgcccgtgcgggctggaacggtaaaggaatgtttgtatttcagcgccctggtgacacattatcctgtaacataatcacgaacgtgaagtcgttgcctgatagcgtaaaaacgtttctggtagctcaggagcgcgacattttgtttctgccctatttatgcatgtacgcggctgatgggtcgattgtaaatgggtggctggcctcccaaacggatatgttagccgacgactggaccattcttgactaa

SEQ ID NO: 771 - DNA, 261 bp, synthetic construct
  misc_feature 1..261: note = NA sequence of anti-defense homologs identified (more details in the specs)
  source 1..261: mol_type = other DNA
atgaatttcggacaagcgattgaagcagttaaggaaggaaataaaattgcacgtaaaggttggaatggtaaaggtatgttcgtttattatgtgccagcagcatcatatccaccagctacagatattatgaaagaagtttttgagggagagtatgtcccatatcgtgagtaccttgcactgaaaacggcacaaaacgacgtcgctacatgggcgcctagcacttctgatgcattagcagaagattgggaggttgttgaataa

SEQ ID NO: 772 - DNA, 237 bp, synthetic construct
  misc_feature 1..237: note = NA sequence of anti-defense homologs identified (more details in the specs)
  source 1..237: mol_type = other DNA
atggacttcggaagcgcactgaacgagctgaaagccggcaacaaggtgcagcgtgacggctggaatggcaagggcttgtggcttgaactgcaacacccggacgagaacagcaaaatgacgctgccctatctgtttctcagctaccccgacgacgcggcaaacactccgggcgcacgtgtgccgtggctcgccagtcaaactgacgttctggcagaggactggaagcgggttgcgtga

SEQ ID NO: 773 - DNA, 444 bp, synthetic construct
  misc_feature 1..444: note = NA sequence of anti-defense homologs identified (more details in the specs)
  source 1..444: mol_type = other DNA
atgacgcaagactattacgggaccaagcggataaccgcatggcccgcaaccggcgaagacggtcaggcggaaggttacgccgtcaaatatgctgacggatacacgtcctggtcgccgaaggatgttttcgaggcggcctatcagccgctcggctctctgtcctttgggcacgcgctcgtcgcgttgaaggcaggccaccgtgtcgcgcgcgccggctggaacggcaagggcatgtggctcgcgatccaggaaggatcgacgatcgccgccgaatatgcgcgtggcggcgcgaccaagggtcgggccaacgagggcgccgcggaaatctccatacttccgcacatcgacatgcgcgccgccgacggatccatcgtcgtcggctggctggcctcgcagaccgacatgctggcggacgactggacgatcgtcggaggggagatctga

SEQ ID NO: 774 - DNA, 540 bp, synthetic construct
  misc_feature 1..540: note = NA sequence of anti-defense homologs identified (more details in the specs)
  source 1..540: mol_type = other DNA
atgctgccgaacaaagtgacccccgaagcgatggaagcgcgtattgctgctacgcagtacacgcacccggaaggcacaaccctgaccttctgcatcctgcacctcgacaacggatataccgttaccggcgagtcggcttgtgtcgacccggccaactttgacgccgagctgggccggaagatcgcccacgagcaggcgttcgacaagctctggccgctgtttggctttttgctggccgaggatcgttaccgcgaggcaggtgacagcaaggccaccggcctggactttggcgaagcgctgaagattcttcgagccggcggcgctgtgaagcgggccggctggaatggccagggcatgtacgttttctggcttcagggcagcaacaccatcgccaaaatccacgggttcgggtttggcgagtatatgggggagcccgtgttccgggacgcgttgttcatgtacacggccaacggggaacttgtcccctggtctgtggcgcagtctgacgcactggcagaggactgggagatagtgcaatga

SEQ ID NO: 775 - DNA, 486 bp, synthetic construct
  misc_feature 1..486: note = NA sequence of anti-defense homologs identified (more details in the specs)
  source 1..486: mol_type = other DNA
atggataagtacattggagttaaaattattcaagctgagcccatgacgcggggcgattataacaaattcaaaggatggactattccgcaggatgaagatccaaacgacgaaggctatcttgtgaaatataaagatggatatatttcttggtcaccaaaaggaatctttgaagactcaaaccgcaaaaccgatggtatgacatttgggtttgcagtggaagccatgaaaaatggtttcaaggtatgccgtaaaggttggaatggcaagggaatgttcatctatttaactacaggcagtattgttccggtagttaatttgaaatcggaaacagtcaaacatctatatggcgaaaggttgttagaatgtgacgaatgtgttgaaattagaagtcatgttgatatgaaggcagctgacggaacaattactatcggatggaatccatcacaagtagatatgcttgcggaagattggcagatcgttaattaa

SEQ ID NO: 776 - DNA, 282 bp, synthetic construct
  misc_feature 1..282: note = NA sequence of anti-defense homologs identified (more details in the specs)
  source 1..282: mol_type = other DNA
atgcttaaaattagggaggaaaagaaaatgaattttggtaaagcattagaagaagttaaaaaaggtaaaaaaacagcaagaaagggctggaatggcaaaaatcagtacattgaattagcaactgctataagctatgtgaacgtaaatggagaactagtgaattgcaaccatgatgcaatcggaaataaggcaattgcttttgttggaacatctggtgtacagattgggtggcttgcatcacaggctgatatgctagcagaagattgggaggtagttggataa

SEQ ID NO: 777 - DNA, 288 bp, synthetic construct
  misc_feature 1..288: note = NA sequence of anti-defense homologs identified (more details in the specs)
  source 1..288: mol_type = other DNA
atggatttcggagacgcgctgcgcgcgctgaaggcaggcgccaaggttgcccggcaaggctggaacggaaaggggatgtggatcgcgctgaccccgggttcagcgttcgaggcggcccatgccaagtgcggccacgctgcagccaagcgcgcggcggagctgcagcccgatgacgagatcgagctgctgccgcacatcgacatgcgcgcggccgacggctgcatggtggtgggctggctggccagccagaccgacatgctggccgaagactgggtggtggtcgagtaa

SEQ ID NO: 778 - DNA, 453 bp, synthetic construct
  misc_feature 1..453: note = NA sequence of anti-defense homologs identified (more details in the specs)
  source 1..453: mol_type = other DNA
atgaaaacctatatcggcacgaaaatcattgaggcggtccctgctattcgcaagggcgtcagggtctacgaggagggccagccaacccccaagagcatggaccccgtggaggagggctataaggtccgctacccggacggctacgagagtttcagccccaaggccgtgttcgaggcggcgtaccgccccatcgacagtatgaacttcgggctggctatcgaggccatgaagaaggggaagaagtgcagacgggcgggctggaacggaaagaaccagcacattgagctggcctctgccatcagttacacgtccccggctggcacaatcgtcaatgccgagcacgcggccattgggaacaaggctatcgcattctgcggcacttccggcgtgcaaatgggatggcttgcaagccaggcggatatgctggccgacgactgggaaatcgtggagtaa

SEQ ID NO: 779 - DNA, 378 bp, synthetic construct
  misc_feature 1..378: note = NA sequence of anti-defense homologs identified (more details in the specs)
  source 1..378: mol_type = other DNA
atgggcatgcggggcaagggcgccgacggagatacggtgccggaggatcaggaggtagtcggtccggcgacctctgatcttgatttcggcgacgcccttcgtgcgctgaagcgaggcgagcgcgtctgccgcgccggctggaacggcaagggcatgtggctctcgctcagcgggcctccccgcggcctggaagtcaccgccgagcggttctggtccgccaacaacgccgagttcgcgcgccgcagcggcggcgccgctgtcgtcctccccgccatcaccatgaagaccgccaccggcgagatcctcatgggctggctcgcctcccagacggacatgctcgccgaggactggatggtcctctcggccgacgccgcctga

SEQ ID NO: 780 - DNA, 495 bp, synthetic construct
  misc_feature 1..495: note = NA sequence of anti-defense homologs identified (more details in the specs)
  source 1..495: mol_type = other DNA
atgcagcaatacatcggcaccaagattatcaacgccaagcccatgacccggctcgcctacaaccagtttcgcggatgggaactgccggctagcgagaacggcaccgatgaaggcttcctcgtcgaatacgtcgacggcggcaaggccaacactgccgagtacgccggctacgtgtcgtggtcgcccgaggatgtgttcgagcgcgcatatcgcccggccgccggcatgacgttcggacaggccatcgaggcgatgaagctcggacagtgtgtcgcccgcgccggatggaacggaaagggagtgttcctgtacctgattaagggctccgatctgcaaagcggcctcaagtatggcttcggagaactcatcggcgagccggaattcgtcagcacgatttgcatgaagactgcggacaacaagctagtcgctggctggctcgcatcgcagaccgacatgctggccgaagactggtacatcgtgggagagccagcatga

SEQ ID NO: 781 - DNA, 522 bp, synthetic construct
  misc_feature 1..522: note = NA sequence of anti-defense homologs identified (more details in the specs)
  source 1..522: mol_type = other DNA
atgagtaaaaaattaatcgaattatcaatggtggctttcattggtaccaaatcagtattagcaacaccaatgacacgcggtgagtattgcgactatcgtggttggaaaattccagatgatgaagatccaaacgaaccagtttacttggttgaatatacggatggcggaaaagctaatgatgaacgacataatggttatataacaatgtcgccaaaagaggtgtttgataacgcctatcgacctaatggcagcctgaattttggtgatgctattcgagctttaaaggaaggtaagaaagtggctcgtagcggctggaatggcaaaggtatgtggttaattcttacacatgggcgagttgttgagaatttagaacctaacagcttctatgaaaaatgtggatttgaagcacctgtaactatttgcagtcatattgatatgaaggctgctgatggatcaatggttgttggatggctggcaagtcaaacagatatgctagctgatgattgggctatcgttgagtaa

SEQ ID NO: 782 - DNA, 483 bp, synthetic construct
  misc_feature 1..483: note = NA sequence of anti-defense homologs identified (more details in the specs)
  source 1..483: mol_type = other DNA
atggctaaatacgtaaagaaacccgttgtgatcgaagcatatcagacagacaaagaaatgattatccatacgctagaaggcgatatgaaagccagtgtcggcgattatatcatcacgggtgtacacggtgagcaatacccgtgcaaaccggatattttcagaaaaacgtatgaaccttttgaaactaaagcggaaactaacttgacgtttggcgaaatgttggaatacttgaaacaaggtcggaagtgctatcgtcgcggatggaacggcaaagaacagtacatcgtacttgggacggcaatcagctatgtcaatccggatggatacgcagtcaacactaatcatactactatgggaagcgcggcaatcgtttttgtgggcacacaaggtgaacaagtaggctggcttgcaagccaagctgatatacttagcaatgactgggcaatcagacccgatgattgcgaatacaactgctgtggataa

SEQ ID NO: 783 - DNA, 546 bp, synthetic construct
  misc_feature 1..546: note = NA sequence of anti-defense homologs identified (more details in the specs)
  source 1..546: mol_type = other DNA
atgacacagcagaaccgcattactaaagattttttagagtcagaaattactaacgttgaatatcagcgcttatctggcaccatcacgcattgcacgattactgttaaaaatggatttacatttactggtgaatcggcgtgtgttgatccaaataattacgaccaaatgattggtgaaaagattgcttatgacaacgcatttgaaaaaatgtggatgccgtacggctttgccttaaaacaaaaattaggcgaagaagtgcaggaagttggtgaaagtatgacttttggtcaagcaatcgaagctttgaaattaggcgaaaaagtagcgcgtaaaggctggaacggtaaagggatgtttttatactatgtgcccgctgcatcttatcccgcacaacgtaacgaaaaaggaacgatgctaggtgtgtttcctaacgatatggtgccgtattgcgcttatatcgctatgaaaaccgcacaagataatgttgtgccatggttagcgagtcaatcagatgttcttgctgaagattggattttagttaaataa

SEQ ID NO: 784 - DNA, 423 bp, synthetic construct
  misc_feature 1..423: note = NA sequence of anti-defense homologs identified (more details in the specs)
  source 1..423: mol_type = other DNA
atgactaaaaaatatgaagtagttgatattgcagaattaaaagaaaaaattgagcaattagcaacagacttagataccacaaacgtagcggtttcacgacttatagatgacaacgccaaatctaatcaatccttagcacaaaaagttatagaatcagctgcaacaaaaacagagaatatgaattttggtgaagcactagaagccgtaaagaatggcaaaaaaattgctcgcaaaggttggaatggtaaaggacagtacgtttttctaattgagggtatggaattaactgaatttatcgttaaaaataaattgggcgactttgcaactggagtattagcaattaagacgtctaatggcataactcaagtaggctggcttgcaagtcaaacggatatgctagctagtgattggtatatagtttaa

SEQ ID NO: 785 - DNA, 495 bp, synthetic construct
  misc_feature 1..495: note = NA sequence of anti-defense homologs identified (more details in the specs)
  source 1..495: mol_type = other DNA
atgccctggtcgttcgactacaaggggtatggcattagtcacgaaaacgacgactgctacctgatcccgacgctcgaagggaccatgaagatgacccgcgaggacctgctgatcaccggcgtgaagggcgaaatctacccgtgcaaacgggacattttcgaagtgacctatgagccggccgatcccaaaacggcaatcggcttgaatttcggtgaagcgattgcggcactgaaggcgggcaaaaaggtcgcccgccaaggttggaacggcaaaggcatgtggctggtattgatgccgggtttatttttgccgcccttcaactcgcaagagccaggcgccaaagtcaatgacaggaccgcgaagcacattagtaaagatacgccgctggattgtcagccctacatcgtaatgtggaccgcattaaagcagtggcaaccgggctggttagccagtcaggccgacatgctcgcagaagattgggttgtcgtcgaatga

SEQ ID NO: 786 - DNA, 255 bp, synthetic construct
  misc_feature 1..255: note = NA sequence of anti-defense homologs identified (more details in the specs)
  source 1..255: mol_type = other DNA
atgaattttggacaagcgatagaagcactaaaggccggtcaaatggtacaacgccaaggctggaacggaaagggaatgcacatttatttggagcagggacggcatttgccgttaagcgcaggaattgagaaaggcacgactaggatttatgacccggttatctgcatgtacacagcgcaaggcacgcaccaacctggatggcttgcaagccaagcagatatactggccgaagactggcagacggttgacggctaa

SEQ ID NO: 787 - DNA, 528 bp, synthetic construct
  misc_feature 1..528: note = NA sequence of anti-defense homologs identified (more details in the specs)
  source 1..528: mol_type = other DNA
atgcagacatttattggaaccaagctgatcaaggccacgccgatgacccgcttggaatacaacgagtaccgcggctggacgctgcccgagaacgagaacggcgcggatgccggcttccttgtggagtatctggacggcgggcaggccaacgattcgcggcacgtcggctacatcagttggagcccggaggcggtgttcgagcgtgcgtatcgacccaccaacggcatgaccttcggcctcgcgatcgaggcgctcaaggccggcaagaaagtggcacgtgccgggtggaacggcaagggcatgtggctgcgcttgcttgacccttacgcgccacacccggacatgcttgcgggtcgttgcgacggtgtgcgaaccaacccgtatttcaaggcggcagacaataacactgaggccaagggaacgatgctgtcgtggattggcatgaagacggcggacaacatgtttgtaccctggcttgcaagccagaccgacatgctgtcagaagactgggctgtggtggagggctga

SEQ ID NO: 788 - DNA, 543 bp, synthetic construct
  misc_feature 1..543: note = NA sequence of anti-defense homologs identified (more details in the specs)
  source 1..543: mol_type = other DNA
atgggccggtttacgaagcgccccgtcacggtcgaggcggtgcagttcaacaagatcggcgaccatcctgcggtcaaggccggcttcggcaccggcttctgcattgagggtcgccagggcttcgtcggggttcagccgggcgactggatcatcaccgagatgaacggcgccggcttctatccgtgcaagcccgatgtcttcgaagcgacctacgtgccggccgaggaccgcgacccggcggcaatgtcgttcggcgatgccctccgtgcgctgaaggccggcgagcgcgtctgccgggctggctggaacggcaagggcatgtggctctcgcttagtgggccgccccgtgggctcgaggtcgtcgccgagcgcttctggtcggcaaacaacgcccacttcgcgcgccgcagcggcggcaccgcgaccgtcctccccgccatcaccatgaagaccgccaccggcgagatcctcatgggatggctcgcctcccagacggacatgctcgccgaggactggatggtcctcccggccgacgccgcctga

SEQ ID NO: 789 - DNA, 306 bp, synthetic construct
  misc_feature 1..306: note = NA sequence of anti-defense homologs identified (more details in the specs)
  source 1..306: mol_type = other DNA
atgtcatattcaaataattcagaagaaaacttatcttttggtcaagcaattgaggcgcttgaagatggtcagcgcgtcgctcgctctggctggaatggaaagggtatgtggctacgtttagtaaaaactggatcttatgatgttgcctgcggttgtgtttatccgaatggaacgcatgaagaggctcaagatgttatttccctttcgccatggattggaatgaagacggccgattctaaatttttaccttggttagcgagtcaatcagacatgctagcgaaagactggtgtgttgtaagtggctaa

SEQ ID NO: 790 - DNA, 471 bp, synthetic construct
  misc_feature 1..471: note = NA sequence of anti-defense homologs identified (more details in the specs)
  source 1..471: mol_type = other DNA
atgacgcgagattactacgggacgaagcgtgtaacggcatggcggtcggactggcccgacaaaggggcgggtgagagccagtcgggtgaaggctacaaggtcaagtacgaggacggatatacgtcgtggtcgccaaaggcagttttcgaggccgcctatcagcccgtcgacgcgatgtcattcgggcatgcgatcgtcgcgctcaaggctgggcaccgcgtttgccgcgccggttggaatggcaagaacatgtggctggttcttgtccccggttcgaatggcctcacagtcgacgaaggccggccgctcgccaaagctggcttggatgtcggcaccacgttcaactacctgccgcacatcgacatgtggaccgcccagggcgatctcgtgccctggctctcgtcccagaccgacatgctggcggacgactggcagatcgtggaggccgaagttggatccgaagctgcgtaa

SEQ ID NO: 791 - DNA, 489 bp, synthetic construct
  misc_feature 1..489: note = NA sequence of anti-defense homologs identified (more details in the specs)
  source 1..489: mol_type = other DNA
atgaattttgacaaagcttttaagctaatgaaagatgggcttggtattaaattgccatcatgggcaggatattggttttgggataatgaaaaagaaactataataatgcattgtaaggatggtaagaaagttgacataagagaaacacaagtagtggagtacacattacaaaatatattaagcgatgagtggattgtagctgatgctggtagtactcctgttttaggtggaacagcaacttttaattttggtgaagctattaagtatttaaagagaggattaaaagttgccagaagcggttggaatggaaaagggatgcatttaaaattagttcctaatggctattatgatgttgggttatcaattgttgaggagccttgcgaaggactactaccttggataggtatgaagacagctgataataaatttgtcccttggttagctagtcaaacagatatacttgctgaagattatacttttgttgattaa

SEQ ID NO: 792 - DNA, 459 bp, synthetic construct
  misc_feature 1..459: note = NA sequence of anti-defense homologs identified (more details in the specs)
  source 1..459: mol_type = other DNA
atgaagaaatatatcggaactaaaatgttacaagctactcctatgagtataggagattataacaagtacagagggtggactattccaagcaatgagaacccaaacgacgaaggatatcttgttgaatatgaagatggttatcaatcatggtcacctaaggaagtatttgagaaagcatacaaggaatgtaacggtatggtatttggaattgccgtagaattgcttaagaatggattcaaggtggcaagagcaggttggaatggaaaaggaatgttcatttattacgtgccaggtgcaagatatgaagcatgtacagatattggagctagcatagcagacgaagaaaataaagtggcatatgaaccatacttagcaattaagaatgtaaaaggaacagtttctacatgggttcctagcattaatgattgcttagcagaagattggaatattgttgattag

SEQ ID NO: 793 - DNA, 666 bp, synthetic construct
  misc_feature 1..666: note = NA sequence of anti-defense homologs identified (more details in the specs)
  source 1..666: mol_type = other DNA
atggactttggagaggctttgaaagccctgaaagcgggtgcctgcgtggcgcgcgagggctggaacggcaaggggatgtggattgccttgaccccgggttcggcattcgaggcgcgccatgccaagtgcggccatgctgctgcgaaacgggcggtcgagttgcaccacccagacgccgaaatcgagctgttgccgcatatcgacatgcgcgcggcggatgggtcgatggtggtgggctggctggcctcgcagacggacatgctggccgaggattgggcggtggttggcggttcgggtgccctgccggctggcgtcgatctgatcgcagacgaacgcgcggatcagatcgaaaatcatgggtggacgccggggcatgacgatacccaccgtcgcggcgaactgctttgggctgctggctgctacgtgcaggaggcggcgtctgcggccgaaactggccggggcgactgcccggttcccggttggccgccggagcaatggccgtgggaaaaggactactggaacccacgggatgaccagcggcgcaacctcgccaaggcgggtgccttgatcgccgccgaaatcgaccgcctgaaccgcgccgccctctcggcagcatcgacaagcgatgcgtctgccgggccaacgccctcgcagagcgagggctag

SEQ ID NO: 794 - DNA, 303 bp, synthetic construct
  misc_feature 1..303: note = NA sequence of anti-defense homologs identified (more details in the specs)
  source 1..303: mol_type = other DNA
atgaatttcggcgaagcactgaagcaggtgaagctcggctatcgggcagcgcgcgggtcctggaacggcaagggcatgttcgtctatctcgagcatggctcggcgccgaccagcttccaccagcttgccgagcgcggcaccatcaatggcgtctcctcgctgctgttcgaggtcggccatgagggcacgaccgtccgcatgccgcatctcagcctgaaggccgccgacggctcgcgcgtcaccggctggctcgcctcccagaccgacctgctggccgaggactgggtggtctatcccggctga

SEQ ID NO: 795 - DNA, 525 bp, synthetic construct
  misc_feature 1..525: note = NA sequence of anti-defense homologs identified (more details in the specs)
  source 1..525: mol_type = other DNA
atgactaaacatattggcgtcaaattaattaatgcgttccctatgacccgccacgagtataacgctttccgcggctggcagcttcctaccgacgagaacggcgcggatgaaggctatctggttgagtatctggatggcggaaaacctaacaccgatcgctttgatggctacgttagctggagtccgaaagaggtattcgaaaaggcttaccgtccggtatcagggctaagtttcggccttgccattgaagcgctcaagaagggtaaaaaagttgcccgcgctggctggaacggtaaggggatgtggttggcatatgttaagccgcacagtgaagccgttcacactggcaacactccttgcttttgcagtcgcgtctttgagttgccggaggggacgcagggagacccgaaacgcgctccggaacaactgccgtatattgccatgaaaacagcggacgataaattagtgccgtggctggctagtcagactgatgtcctagccgaagactggaacatcgttgagtaa

SEQ ID NO: 796 - DNA, 522 bp, synthetic construct
  misc_feature 1..522: note = NA sequence of anti-defense homologs identified (more details in the specs)
  source 1..522: mol_type = other DNA
atgacccagcacataggtgtaaaattaatcaacgcatttcccatgactcgccaggcatacaacgattttcgtggatggcaacttcctgccgatgagaacggctctgatgatggctatcttgttgaatatctggacggcggaaaacctaacaccgatcgctttgatggctacgttagctggagtccgaaagaggtattcgaaaaggcttaccgtccggtatcagggttaagttttggcattgccattgaagcgctcaggcagggtaaaaaagttgcccgcgctggctggaacggtaaggggatgtggttggcatacgttaagccgtacactgaagcagttcacactggcagtacaccttgcttttgcagtcgcgtctttgagttgccggaaggtgcgcagggagacccgaaacgcgctccggaacaactgccatatatcgccatgaaaacagcggacgaaaaattagtgccgtggctggctagtcagaccgatgttctggccgaagactggcaaatcgtttaa

SEQ ID NO: 797 - DNA, 441 bp, synthetic construct
  misc_feature 1..441: note = NA sequence of anti-defense homologs identified (more details in the specs)
  source 1..441: mol_type = other DNA
atgaatttcggacaagcacttcaagcactgaaagctggatacaaggtggcccgcattgggtggaatggcaaagggatgtttctaattcttatctcaggcactaaagatgtagaaccttgcgagggaacaccatacgcagatttagccgtttctccccaaggtattgtgactatcaacgcccacattgacatgaaaacagctactggtgaaatgcaaccaggctggctggcatcccaaacggatatgttagcagaggactggaccatcgtaggtaatgagacagtggtcaactccgttggtgagtatgaattgcctattgggcaaatcgtgaaagtcgatggtttcccatttgagttacgggaaccggtaagggcgctaagtagccagcatgtactggatgttctccgtgctgataagaacatagggattcaggctgtttaa

SEQ ID NO: 798 - DNA, 582 bp, synthetic construct
  misc_feature 1..582: note = NA sequence of anti-defense homologs identified (more details in the specs)
  source 1..582: mol_type = other DNA
atggattttggagaagcattaaaagcaatgaagtgtgggaaacgagtgcgacgctcgggttggaacggcaaaggtatttttatcagtattatttttggtgaggcctatgaggatgcaagtcgcaataaatatatgactcatgattatatttgtattgataccaccgggttaaagactgacaacgaatactcacctaaagaccgtgttccgtgggtagccagtcaaacagacatgttggctgatgattggaaactagttgaaactcaagcagagcaaacaaagcgagtgattaagcgaatgcgtgatagttcaagaaaggctcaaaaaaagcttattacaaattcaacgataaacgtaaaaattaatattgatgacgacagtttgaaaacagccgttaaaaaaattgatgagcatttatctatgagttatcgaccggtttcaacagtgtatctcaaacttgacgatgccgaacacgttcgaggaatggcaatcccatttaaaaccagttatcccgatcaaattaaggaagttcaagatgtattgcagcaaaacatcgatggcggattgattagcattaattaa

SEQ ID NO: 799 - DNA, 297 bp, synthetic construct
  misc_feature 1..297: note = NA sequence of anti-defense homologs identified (more details in the specs)
  source 1..297: mol_type = other DNA
atgatgaactttggcgaagcgttgggaagtatgaaagaaggtaagaaagtggcacgcgcagggtggaatggtaaaagccaatttgtagtagtgatgcccgctttgtatttgccgccacattccacacaagaacccggggcgaaggtgaacgaccggacggcgaagcacattggtgtagatacgccattggactcacagccgtactgtgctctattcaacgcacagggtaaatggcagccaggttgggttccgtcgcagggtgacttgttcgctgaggactgggtaatcgtcgagtaa

SEQ ID NO: 800 - DNA, 558 bp, synthetic construct
  misc_feature 1..558: note = NA sequence of anti-defense homologs identified (more details in the specs)
  source 1..558: mol_type = other DNA
atggaaaaccgtgtaactaaagaacacttggaatcaattattgttgataaaaaattccaccgactaactgaaacattaacagtttgtgtattaactctacgaaatggctttaccgtgactggtgaatctgcttgcgttgatccagctagctacaaccaagaaattggcgaaaatattgcttatgaaaatgcctttgaaaaattgtggcagttggaagggtatatgcttaaaactaagttgtacgatgaaaaatctgcgcattacccggaagacataaagaatcaaaccccttttaattttggatacgcgcttaatttacttaaaaaaggtaaaaaagtttctcgcgcaggttggaatggtaaggggatgtttctgtttattgttaaaggaggtgctataacgcaagctgttgctgaacattatggtaactctgaacgaccagaaacaaacttaccagtattggatgcaatttacatgaaaacagcagataacaagttggtgccttggttagcaagccaaactgatgtacttgctgaagattggaatgtcatagattaa

SEQ ID NO: 801 - DNA, 489 bp, synthetic construct
  misc_feature 1..489: note = NA sequence of anti-defense homologs identified (more details in the specs)
  source 1..489: mol_type = other DNA
atgcaaaagtacataggaacaaaagagatcaaatcgatgccaatgagtcgtggagaatacaacaaactacgtggctgggaagtgcctacggatgaaaatccaaatgatgagggctatcttatagagtacgctgatagtaagaaaaatcatccaaattttgacggctatatctcgtggtcgcctaaaaacatttttgaagctgcctatcaaaatatctctgatgggtttgattttggctctgcaatacgttttttaaaacagggtaaaaaggtagctcgcaaaggctggaatggcaaagggatgtttttatttttagtcaaaggatctaaatttatcgcaaatcgcgaaccacttttatctatctttggtgagggggaggagattgattattgtcctcacatcgatatgaagacggctgacgataaggttgtgccgtggcttgctagtcaaacagacgttcttgctactgactgggtgctagtagaatga

SEQ ID NO: 802 - DNA, 714 bp, synthetic construct
  misc_feature 1..714: note = NA sequence of anti-defense homologs identified (more details in the specs)
  source 1..714: mol_type = other DNA
atgaaaaagtacattggaacaaagagtgttgaggctgtgcctatggaattgggcgagtacattaacaagggtgggcgcaatccatacaaggaaggtactcacaaagacgatgagcaaggctaccttgtgaaatacgaggatggctatgagagttggtcgccaaaggacgtgtttgaaaaggcttacaagcctgctgatacgttccttgatagactttacattgaagatactgagctgaaagaaaagtacaacaagtgcaatgctttcgttgattcagacaagttcagagaaatcataaaagaggattatccagcctttcttttgtatctccaacgtgaggcaatgggcagttacctagggacgcttcataaccgcatagagtatgcaaacggggctaaattgaagcccgatacaaagtataattttggagaggctattcaggcattgaagttcggtcttgctatccgcagaagtggatggaatggtaagaacttaatggtattcaagcaagttcctgcttacattgagggtagtattattcccaaaatgcaatcgctcccacagagcgcaaaagatttgataggcaagggaaacaactttatcgcttacacaagtcagtgtcttatctataatagaggtactggacgtgctgatagttgggtaccgtctgtctctgatgtgttcgcagaggattgggaattggtaatgggataa

SEQ ID NO: 803 - DNA, 489 bp, synthetic construct
  misc_feature 1..489: note = NA sequence of anti-defense homologs identified (more details in the specs)
  source 1..489: mol_type = other DNA
atgcaaaagtacataggagtgaaagagattaaagcgatgccaatgaatcgtggagaatacaacaagttacgtggttgggaagtgcccatggatgaaaattcaaatgatgagggctatcttatagagtatgctgatagtaagaaaaatcatccaaattttgacggctacatctcgtggtcgcctaaaaatctttttgaagctgcctatcaaaatatctctgatgggtttgattttggctctgtggtacattttttaaaacagggtaaaaaggtatcccgaaaaggttggaatgacaaggggatgtttttatttttagtcaaaggatctaaatttatcgcaaatcgtgaaccacttttatctatctttggtaacggggtggagattgattattgtcctcacatcgatatgaagacggctgacgataagatagtgccgtggcttgctagccaaacagacgttcttgctactgactgggtgctagtagaatga

SEQ ID NO: 804 - DNA, 264 bp, synthetic construct
  misc_feature 1..264: note = NA sequence of anti-defense homologs identified (more details in the specs)
  source 1..264: mol_type = other DNA
atggatttcggctctgccctcgtggcactgaaagacggcaagcgcgtttctcgcgctggctggaacggcaagggcatgttcctgttccttgtccccggctcgcacttcaaggtcaatcgtccgcctcttctcgggatctatcccgaaggcacaggcatcgattaccgcccgcacatcgacatgaagaccgcacagggcgacgtcgtgccgtgggtagcgtcgcagagcgaccttctgtgcgaggactggggaatcgtcgaatga

SEQ ID NO: 805 - DNA, 480 bp, synthetic construct
  misc_feature 1..480: note = NA sequence of anti-defense homologs identified (more details in the specs)
  source 1..480: mol_type = other DNA
atgacccagcatattggcgtaaaactgattaacgcctttccgatgacgagacaggcatataacgattttcgtggctggcagcttcctgccggagaaaacggcgaggacgaaggctatctggttgaatatctggatggcggaaaacctaacaccgatcgctttgatggctacgttagctggagtccaaaagaagtattcgaaaaggcttatcgtccggtatcaggactaagtttcggccttgccatggaagcgttaaaacagggcaaaagtttgcagcgggcaggatggaatgggaaagaccagtttgtttatctcgtgaaaggggaaaaattagcgtctgcgttgggttatggctttggcgaatatgttggcgagccaactttcaatgacacgcttgtattgaaaaactcacagaaccgccttgctacatgggttccatccattggcgacctgatggctgaagactggcaaatcatttaa

SEQ ID NO: 806 - DNA, 480 bp, synthetic construct
  misc_feature 1..480: note = NA sequence of anti-defense homologs identified (more details in the specs)
  source 1..480: mol_type = other DNA
atgacccagcatattggcgtaaaactgattaacgcctttccgatgacgagacaggcatataacgattttcgtggctggcagcttcctgccggagaaaacggcgaggacgaaggctatctggttgaatatctggatggcggaaaacctaacaccgatcgctttgatggctacgttagctggagtccaaaagaagtattcgaaaaggcttatcgtccggtatcaggactaagtttcggccttgccatggaagcgttaaaacagggcaaaagtttgcagcgggcaggatggaatgggaaagaccagtttgtttatctcgtgaaaggggaaaaattagcgtctgcgttgggttatggttttggcgaatatgttggcgagccaactttcaatgacacgcttgtattgaaaaactcacagaaccgccttgctacatgggttccatccattggtgacatgatggctgaagactggcaaatcatttaa

SEQ ID NO: 807 - DNA, 270 bp, synthetic construct
  misc_feature 1..270: note = NA sequence of anti-defense homologs identified (more details in the specs)
  source 1..270: mol_type = other DNA
atgaacttcggccaagcaatcgaagcagttagggcaggagaaaagatttctcgtaaaggttggaatggtaaaaatatgtttgtagtttatcagaagggttatcctgatggaatcccttgcaacaaacagaccgctgaagctttgggtataaatgagggagatttatttaaagttcgcccatacttacagttaagatgtgctgatggaacccatgccatgtggtcacctagcacttctgatactttagctgaagattgggttgttttataa

SEQ ID NO: 808 - DNA, 264 bp, synthetic construct
  misc_feature 1..264: note = NA sequence of anti-defense homologs identified (more details in the specs)
  source 1..264: mol_type = other DNA
atgagttttggacaagcgatagtggcactagtgcaagggaaaaacgtagctcgtgaaggatggaacggtaaaaatatgtttttgtatcttattgaaggtaataaattgtctaagggattaggatatggatacggcgagtatgtaggggtagaaccttcatttgttgataccattgcaatgaagactgcacaaaatacaattgttgttggctggctcgcatcccaaacggatatgttagcaaatgactgggtaattttaaattaa

SEQ ID NO: 809 - DNA, 273 bp, synthetic construct
  misc_feature 1..273: note = NA sequence of anti-defense homologs identified (more details in the specs)
  source 1..273: mol_type = other DNA
atgaattttggaaaagcactcgaattaatgaaaagtggcaataagttgtcacgtaaaggttggaacggtaagaatatgtttgctgtttatcaaaaaggatatcctgatggaattccttgtaataaacaaacggcagaagcttggggattaaatgaaggtgatttatttaaggtacgaccttacttgcaattacgttgtgctgatggcactcatgcgatgtgggttccaagtgtatctgatattttagctgaagattggatgattgttgaataa

SEQ ID NO: 810 - DNA, 228 bp, synthetic construct
  misc_feature 1..228: note = NA sequence of anti-defense homologs identified (more details in the specs)
  source 1..228: mol_type = other DNA
atgatggattttacgaaagcattagagttaattaaaataggtgataaattagctagaattgattggagaggtacgggaatgtatgtaacagtatgtaatactcctgatttccaaccgtttgtttatattaagacatcagaaggcaccacagttccttggttacctagtcaaacagacttatttgcaaaagactgggaaatttttaaagatggttggaaaagaatataa

SEQ ID NO: 811 - DNA, 420 bp, synthetic construct
  misc_feature 1..420: note = NA sequence of anti-defense homologs identified (more details in the specs)
  source 1..420: mol_type = other DNA
atggcagtaataattcacagcaaatatgggtacgagccgcctgaatgggtgcaggctgatgctcggctagataggtggtacaaggataagaagcgtcgtgctagtaagcatggcgcttttagtttggataaaaataaggaggaagcaattatgaattttggagaagtgcttgaagaattaaaacgaggtaattgtgttgcacgtaaaggttggaacggcaaaggcatcttcatcaaattgaaaaagggagaatctttgaacactcccaataatcgttttaatgaggttatgactcacgatttcatttatattgacacgactgggctacgtacgaacaatccgaatgcaccgatggatcgagttccatggttagctagtcaaactgatatgctagctgatgactgggtcgtagtcgaataa

SEQ ID NO: 812 - DNA, 432 bp, synthetic construct
  misc_feature 1..432: note = NA sequence of anti-defense homologs identified (more details in the specs)
  source 1..432: mol_type = other DNA
gtgcaaacgttcatcggaaccaagatcatcaaagccgagccgcgcgataagaactatggtccgccggagcaccacggcgagccgggctacaccgtcgtttatccggatggatacacgagctggagcccgaaggcggcgttcgaggaagcctatcgcccctctgacgggctgccgtttggtctcgctgtcgaagcgctgaagaaaggcaggcgcgtcgcgcgtgccgggtggaacggcagtggcatgtttctgttcctcgtgcccggttcgacgttcaaggtcaatcgagcgcctcttcttggcatttatccggaaggcaccgagatcaattaccactcgcacatcgacatgaagacggctcaggacacggtggtgccgtggctggcttcgcagaccgatgtgctcgcagacgactggcaaatcgttgactaa

SEQ ID NO: 813 - DNA, 345 bp, synthetic construct
  misc_feature 1..345: note = NA sequence of anti-defense homologs identified (more details in the specs)
  source 1..345: mol_type = other DNA
atggatttcggtgatgcactccgcgccctgaagcagggcgcgcgcgtcgcccgtgccggctggaacggcaagggcatgtggctgaagctggcgcccggatcggtgatcggcgcgcgcgacgcaaaatgcgggcatgcaaccgcccatcgcgccgaagagctcgaacaccccgagggcgagatcgaggtgctgccgcatatcgacatgcgcgccgctgatggcacgatcgttgtcggctggctggcctcgcagaccgacatgctggccgacgattggcgcattgtcggtgataccgtgcagccggacgccttcgcggccccgttcgattcggcgcgcacggcatga

SEQ ID NO: 814 - DNA, 567 bp, synthetic construct
  misc_feature 1..567: note = NA sequence of anti-defense homologs identified (more details in the specs)
  source 1..567: mol_type = other DNA
atgaagtttcggaaaaagcctgtcgtgatcgaagccacgcaatggtttcaacacggtgaccaccccgcggtgaaacgtgagatcctgagccagtgggcgaccgaaaaggtcggacccgagacgcacggtctgatcgagacgctggaaggcgatcacatggtcagccctggcgattgggtcatcactggcgttgcgggcgagcattacccctgcaagcctgagatcttcgcggctacctatgagcccgccaatcgcaagttcgccttgagcttcagcgaagcgctatctgctctgaaagccggagcagctgtcgcccgtgagggatggaacggcaagggcatgtggattgcgctgacgcctggatccgctttcgaagcgaaatacgcgaaatgcggccatgcagctgcaaagcgtgcttccgagatccttcccgacgaggaaatcgagctcctgccgcacatcgacatgcgggccgccgatggctcgatggtgatcggctggctggcctcgcagaccgacatgctggccgaagactggatgatcgtggcggtcggagaagggcaatga

SEQ ID NO: 815 - DNA, 447 bp, synthetic construct
  misc_feature 1..447: note = NA sequence of anti-defense homologs identified (more details in the specs)
  source 1..447: mol_type = other DNA
atgaccaaggactatttcagcacgaagcgcgtaacggcctggcccgcggaccgcgatgggcaggtcggcatggccatcaaatatgcggacggctatcagtcctggtgccctaaagacgtgttcgatcgcgaataccaacctatcacggcgatgagcttcggcgcggcgctcgtcgccctgaagcgtggcgggcaagtggcgcgggcgggctggaatggcaaggggatgcacatctcgctggtcccgggctcgagcgaatatctggcccctgatcgatcgcgcctgatcggcggggtttccgagaaccacttcgcgctgggcgacagtgggacggtgacgcggatgccccatttggccatgcgcgccgccgatggctcgatcgtcaccggctggttggcatcgcagaccgatatgctcgccgaggattggatgatcgtcggcgagtga

SEQ ID NO: 816 - DNA, 261 bp, synthetic construct
  misc_feature 1..261: note = NA sequence of anti-defense homologs identified (more details in the specs)
  source 1..261: mol_type = other DNA
atgaccacatttagtgaagcgttagaagcagttaaatcaggtaagcgtattactcgtactggctggaacggcaagggaatgttcctgtacttaattaaagggagggatttacaagtcgggcttgaatatggttatggtgagtatgttggagaaccatcatttgttgattccatctgcatgaagactacggataacaagctagtgattggatggcttgccagtcaaacagatctcttagctaacgattggataattttgtga

SEQ ID NO: 817 - DNA, 258 bp, synthetic construct
  misc_feature 1..258: note = NA sequence of anti-defense homologs identified (more details in the specs)
  source 1..258: mol_type = other DNA
atgaattttgtgcaagcgatagtggcgttaaaagaaggtaagcaagtagcgcgccaagggtggaacggcaaaggtcagttcgtgtatttaataaaaggggctgaattgcaacggggtttgaaatatggttacggcgagtatgaaggagagcctactattgtagacgtcctcgctataaaaactacaagcaaccatatccaaatcggatggcttgcttcccaaagcgatatgttggcagaagattgggaaatcgtttga

SEQ ID NO: 818 - DNA, 429 bp, synthetic construct
  misc_feature 1..429: note = NA sequence of anti-defense homologs identified (more details in the specs)
  source 1..429: mol_type = other DNA
atgaaacagtatatcggcacgaaaattattcaggcagagccggcgattcggaagggcggaaaagtctatgcgttaaccgacccgattccgaaaacgatggaaccttccgaagatggatacaaggtaatttatcctgacgggtatgtttcctggtcgccaaaagatgctttcgaacaagcataccgccccactaacggcatgacttttgggcttgcgctggaagctctcaaaaagcgaatgaaagtggctcgtagcggttggaacgggaaagaccaatatgtaaccctcattccggcaggcaatgctatgtttcagggacacgatatgcaagattgtttcggactgaaaaacgcacagggcaatatgcagcccggctgggtgccttccgttggcgactgcctggcggaagactggaatattgttcaataa

SEQ ID NO: 819 - DNA, 558 bp, synthetic construct
  misc_feature 1..558: note = NA sequence of anti-defense homologs identified (more details in the specs)
  source 1..558: mol_type = other DNA
ttgtcctttttttattacaacgaaagggtgattaagatgtcaaagtggcgcaagaaatctgttgtaattgaggcgttcaaatggacaggggaccagaaccaatcagaagatccggtttggatcaacgaagcttatcgacgcggagatgtccgctatgatggtgtaggtacaaatgatatggagatgttcatctccacactggaaggagttatgacggcccgccccggtgattacatcattcagggcatcgagggtgaaatttacccttgtaaggcaagtattttcgagaaaacgtatgaatctgctggcgagataatgagtttcggcgctgcagtagaggcgttgaaggcaggcaagagggttgcgcgggctggctggaacggtagggtgatgtggttgacgctagttccagcatgtcgttacaacccaagcgacgtcaattcactcggtttagaaaagcttccatggatcggaatgaagacagcggataataagtttgttccttggctggcatcgcagacggacgtattggccgaagactggcaggtgattgagtaa

SEQ ID NO: 820 - DNA, 246 bp, synthetic construct
  misc_feature 1..246: note = NA sequence of anti-defense homologs identified (more details in the specs)
  source 1..246: mol_type = other DNA
atgaaattcggtcaagcaattgaagcgttaaaagagggcaagaaagcagctcgtaaaggatggaacggtaaaggtattttccttgaattacaagtacctgatacacattctaaaatgactcacccatacatctacatcgatacgacagggctgcaaacagacaacgagaatgcaccaaaaagtcgagttccttggttagcttcgcaaacagacatgttatcagaggattgggaggtagttgaataa

SEQ ID NO: 821 - DNA, 261 bp, synthetic construct
  misc_feature 1..261: note = NA sequence of anti-defense homologs identified (more details in the specs)
  source 1..261: mol_type = other DNA
atgaattttggtgaagcgttagaatgtttaaaagcaggaaaaagagttagtcgtacaggctggaatggaaagaatcagtttatatttttgattaaaggaactgatttacaaggaactttagggtatgggtacggtgaatatctaggtgaacctacaatagtcgatgtgttagccatcaaaactacatcaaatcaaattcaaataggatggatagcttcacagactgacatgttgtcggaggattgggaagtagttgaataa

SEQ ID NO: 822 - DNA, 261 bp, synthetic construct
  misc_feature 1..261: note = NA sequence of anti-defense homologs identified (more details in the specs)
  source 1..261: mol_type = other DNA
atgacttttggtcaagcgattgaagcagtaaaaaaaggtaataaaattgcacgaaaaggatggaatggtataggtatgtttgttttctatgtgcctgctgcatcatatccaccatctacagatgttatgaaagaatcattcggtggagaaaatgtcccgtatcgcgcttaccttgcacttaaaacagctcaaaatgacgttgctacatggtctccgagtacttcagatgctttagcagaggattgggaggttgttggatga

SEQ ID NO: 823 - DNA, 264 bp, synthetic construct
  misc_feature 1..264: note = NA sequence of anti-defense homologs identified (more details in the specs)
  source 1..264: mol_type = other DNA
atgatgaaattcggacaagcaattgaagcagttaaaaaagggaataaaattgcacgtaaaggttggaacgggaaatgtatgtttgtttattatgtgcctgctgcatcatatccaccagctacagatattatgaaagaagcatttggcggagaaaatgtcccgtatcgtgcatatcttgcattgaaaacagcccaaaacgatgttgctacatggtcccctagcacttctgatgtgttagcagaggattggatggtggttgaataa

SEQ ID NO: 824 - DNA, 276 bp, synthetic construct
  misc_feature 1..276: note = NA sequence of anti-defense homologs identified (more details in the specs)
  source 1..276: mol_type = other DNA
atggatttaactattggtgattttggttgggcatggcatcggttaaaagaaggagaaagggtatttcgttccggatggaatggtaaagggatgtttctgtatctggttaacgggaacgatttttctaccgcgtttagatatggatatggagagtatgcaggggaaccgcgatttgaggattcaattgctattaaaaccgcgcagaatacaatatccgtaggttggaagccaaccaacttggatatgttcgcaaatgactgggaggttgtagaataa

SEQ ID NO: 825 - DNA, 270 bp, synthetic construct
  misc_feature 1..270: note = NA sequence of anti-defense homologs identified (more details in the specs)
  source 1..270: mol_type = other DNA
atgaacttcggccaagcaatcgaagcagttagggcaggagaaaaggtttctcgtaaaggttggaatggtaaaaatatgtttgtagtttatcagaagggttatcctgatggaattccttgcaacaaacagaccgctgaagctttgggtataaatgagggagatttatttaaagttcgcccatacttacagttaagatgtgctgatggaactcatgccatgtggtcacctagcacttctgatgctttagctgaagattgggttgttttataa

SEQ ID NO: 826 - DNA, 252 bp, synthetic construct
  misc_feature 1..252: note = NA sequence of anti-defense homologs identified (more details in the specs)
  source 1..252: mol_type = other DNA
atgacttttggtcaagcgcttgaagcattgaaacaaggtaagacagtggctcgtaaaggttggaatgatgaaggtatgtggttaagactcgtaaagcagggggagtttgatatctcttttgaagtggtaggtggcaacaaatgcaaaggactccttccctggattggtatgaaaacagctgatgatacatttgttccttggttagcatcacaaacagatatgttagcagaagattgggaggttgttgaataa

SEQ ID NO: 827 - DNA, 297 bp, synthetic construct
  misc_feature 1..297: note = NA sequence of anti-defense homologs identified (more details in the specs)
  source 1..297: mol_type = other DNA
atgtttaattttgggcaagccattgaggccttgaaggcagggaagaaggtagcgcgtgcaggctggaatggtaaaggtatgtgggttgttctaatgccatctttgcagttgcctccgcattctacacagaaacctggaccgaaagtaaacgaccgcacagcgaagcatattggcgtagatacaccactggactcccaaccgtacattgccatgtggactgctacaaaacagtggcaaccgggctggttggcttcacaggctgatatgctggccgaggattgggaggttgtcgaatga

SEQ ID NO: 828 - DNA, 420 bp, synthetic construct
  misc_feature 1..420: note = NA sequence of anti-defense homologs identified (more details in the specs)
  source 1..420: mol_type = other DNA
atggcgaaaatgataagaagtaaatacgggtatgagccgcctgaatgggtgcaggccgatgctcggctagataagtggtgcaaggataagaagcgtcgtgcaaataagcatggcgcttttagtttggataaaaataaggaggaagcaattatgaattttggagaagcgcttgaagaattaaaacgaggtaattgtgttgcacgtaaaggttggaacggcaaaggcatcttcattaaattgaaaaagggagaatctttgaacactcccaataatcgttttaatgaggttatgactcacgatttcatttatattgacacgactgggctacgcacgaacaatccgaatgcacctatggatcgagttccatggttagctagtcaaactgatatgctagctgatgactgggtcgtagtcgaataa

SEQ ID NO: 829 - DNA, 276 bp, synthetic construct
  misc_feature 1..276: note = NA sequence of anti-defense homologs identified (more details in the specs)
  source 1..276: mol_type = other DNA
atggaaacatttaaagatatgccatttggcgatgctattgaactgctaaagaaaggcaagaaagtttgccgtgcaggttggaatggcaagggtatgtggttgtttcatgtttcagggcaggaaatggcgcgccgcacgggatatggtttcggtcaatatttatatgagcctaattggaatggcttcattgtgatgaaaacggtagacaataatcttgttccttggacagcaagccaaacggacgttttgtcaaacgattggcagattgtagattaa

SEQ ID NO: 830 - DNA, 480 bp, synthetic construct
  misc_feature 1..480: note = NA sequence of anti-defense homologs identified (more details in the specs)
  source 1..480: mol_type = other DNA
atgacccagcatattggcgtaaaactgattaacgcctttccgatgacgagacaggcatataacgattttcgtggctggcagcttcctgccggagaaaacggcgaggacgaaggctatctggttgaatatctggatggcgggaaacctaacaccgatcgctttgatggctacgttagctggagtccaaaagaagtattcgaaaaggcttatcgtccggtatcaggactaagtttcggccttgccatggaagcgttaaaacagggcaaaagtttgcagcgggcaggatggaatgggaaagaccagtttgtttatctcgtgaaaggggaaaaattagcgtctgcgttgggttatggctttggcgaatatgttggcgagccaactttcaatgacacgcttgtattgaaaaactcacagaaccgccttgctacatgggttccatccattggcgacctgatggctgaagactggcaaatcatttaa

SEQ ID NO: 831 - DNA, 267 bp, synthetic construct
  misc_feature 1..267: note = NA sequence of anti-defense homologs identified (more details in the specs)
  source 1..267: mol_type = other DNA
atggacttctccgacgcactggccgccgtgaagcgcggtcaccgcattgcccgcaagggttggaacggcaagggcatgtatgtgttcctcgtgccgggaagcgtgttcaaggtgaaccgcgagccgctgctctccatgctgggcgaagggacgcaggtgacctaccacgcccacctcgttatgcgcacggccgatggcacgatcgtgccgtggctcgcgtcgcagtccgacctcctcgacgaggattgggagctcgttaccccgtga

SEQ ID NO: 832 - DNA, 261 bp, synthetic construct
  misc_feature 1..261: note = NA sequence of anti-defense homologs identified (more details in the specs)
  source 1..261: mol_type = other DNA
atgaacttcggacaagcaattgaagccgttaaaaagggaaataaaattgcacgtaaaggttggaatggtaaaggtatgttcgtttattatgtgcctgctgcatcatatccaccagctacaagtattatgaaagaagcatttggcggagaaaatgttccataccgtgcgtaccttgcattgaaaacagcccaaaatgatgttgctacatggtcacctagtacgtcagatgcattagcagaagattgggaggttgttaaataa

SEQ ID NO: 833 - DNA, 363 bp, synthetic construct
  misc_feature 1..363: note = NA sequence of anti-defense homologs identified (more details in the specs)
  source 1..363: mol_type = other DNA
atggataataacacaagtacagttggtacagggcgaagtttagttgatttcggagaggctgttaaagctttaaaagaaggaaagagaatccaaagaagaggatggaatggtaaaggaatgtttgtttttatgcaagtaccttcttctgttccagctgaatttgtaccaaagatgtcttctttgcctgaaactgttaaagaggcgttttcgagaagattcgattcaatgagtaaagatttgaagggagatgcagatataagatatcaaaatcagttagcaatggtttatcctgacaacaatatttatggatggttggcctcaccttcagatttactcagtgaagattggatgatattagattag

SEQ ID NO: 834 - DNA, 264 bp, synthetic construct
  misc_feature 1..264: note = NA sequence of anti-defense homologs identified (more details in the specs)
  source 1..264: mol_type = other DNA
atggattttggagaagcaattaaagcattaaaaacaggaaaacggttagcacgtaagggctggaacggcaaaggcatttttattgctttgatgccaggcaactcctttgaggactgtggaggtcataagtgtatgacacacgattatatctacattgataccaccggattgaaaaccacaaatgattcagcaccattggatcgtgtgccatggttagcaagtcaaacagatctgttgtctgacgattgggaggtagtggattaa

SEQ ID NO: 835 - DNA, 264 bp, synthetic construct
  misc_feature 1..264: note = NA sequence of anti-defense homologs identified (more details in the specs)
  source 1..264: mol_type = other DNA
atggatttcggagaagcaatcaaagcattaaaaacaggaaaacggttagcacgtaaggggtggaacggtaaaggcatttttattgctttgatgccaggcaactcctttgaggactgtggaggtcataagtgcatgacacacgactacatctacattgataccaccggattgaaaactacaaatgattcagcgccattggatcgtgtgccgtggttagctagtcaaacagatatgttggctgatgactgggaggtagtaaaatga

SEQ ID NO: 836 - DNA, 522 bp, synthetic construct
  misc_feature 1..522: note = NA sequence of anti-defense homologs identified (more details in the specs)
  source 1..522: mol_type = other DNA
atgacccagcatattggcgtaaaactgattaacgcctttccgatgacgagacaggcatataacgattttcgtggctggcagcttcctgccggagaaaacggcgaggatgaaggctatctggttgaatatcttgatggcggaaaacctaacaccgatcgctttgatggctacgttagctggagtccaaaagaagtattcgaaaaggcttatcgtccggtatcagggctaagtttcggccttgccattgaagcgctcaagttggggaataaagttgcccgtgctggctggaatggtaagggcatgtggctggcatacgttaaaccgtacactgaggctgttcatactggcagtacgccttgcttttgcagtcgcgtctttgagttgcctgaaggtacgcatggagaatcgaaacgatctccgaaacaacttccgtatatcgccatgaaaacagcggacgataaattagtgccgtggctggctagtcagactgatgttctagcagaagactggcaaatcatttaa

SEQ ID NO: 837 - DNA, 273 bp, synthetic construct
  misc_feature 1..273: note = NA sequence of anti-defense homologs identified (more details in the specs)
  source 1..273: mol_type = other DNA
atgaactttggacaggcattagaagcggtaaaggctggtgcgaagatttatcgccaaggctggaacggtaagggtcagttcgtcatcaaggcgggtggttataccgtgaatgagccccgaccaggctctgactatgcgaaagccggtattgcaggtgaatttactattcagcctcatctcgatttgaaaaatgcgcaggggcagatgcagccaggctgggtgccatcccaaggtgatttgtttgctgaagactggattgctgaatcaccgtag

SEQ ID NO: 838 - DNA, 285 bp, synthetic construct
  misc_feature 1..285: note = NA sequence of anti-defense homologs identified (more details in the specs)
  source 1..285: mol_type = other DNA
atggattttggcgaagcattagaagcgttacatcatggtaaaaaggttgctcgtgaaggttggaatggtaaaggtatgtttatttatttggaaagtggaactctaattactccagataagattcgtaacttgacgctcgctaagtctacccctgatagccaaaaatatatcaatattaacccacatattgatatgaaatcagcagatggttcaatcgttgtaggttggttagccagtcaaacagacatgttggcttatgattgggaagttgttggtcgtgattaa

SEQ ID NO: 839 - DNA, 330 bp, synthetic construct
  misc_feature 1..330: note = NA sequence of anti-defense homologs identified (more details in the specs)
  misc_feature 304: note = n is a, c, g, or t
  source 1..330: mol_type = other DNA
atggcagcaatgattcacagtaaatacgggtacgatccgcctgaatgggtgcaggccgatgctcggctagataagtggtgcaaggataagaagcgtcgtgcaaataagcatggcgcttttagtttggataaaaataaggaggaagcaattatgaattttggagaagcgcttgaagaattaaaacgaggtaattgtgttgcacgtaaaggttggaacggcaaaggcatcttcattaaattgaaaaagggagaatctttgaacactcccaataatcgttttaatgaggttatgactcacgatttcntggaacggcaaaggcatcttcattaa

SEQ ID NO: 840 - DNA, 270 bp, synthetic construct
  misc_feature 1..270: note = NA sequence of anti-defense homologs identified (more details in the specs)
  source 1..270: mol_type = other DNA
atgaattttggagaagcgcttgaagaattaaaacgaggtaattgtgttgcacgtaaaggctggaacggcaaaggcatcttcattaaattgaaaaagggagaatctttgaacactcccaataatcgttttaatgaggttatgactcacgatttcatttatattgacacgactgggctacgcacgaacaatccgaatgcacctatggatcgagttccatggttagctagtcaaactgatatgctagctgatgactggatcgtagtcgaataa

SEQ ID NO: 841 - DNA, 771 bp, synthetic construct
  misc_feature 1..771: note = NA sequence of anti-defense homologs identified (more details in the specs)
  source 1..771: mol_type = other DNA
atgagcaacgaccgcatttcctctcaagacgccgccgacgaggcgcagatcgcttcgaagggcctgaatgctccgcgcgtcacgccggccgacatcgaggcggccatcgtcagcgagagctatttcactgcggcggatggcgtgcgtgccgcatccgagagcaagcccggcgcgtcgctgctccccgagtacgtgaccttcaacaagagcccactctcttgcgtcaccatctgtgtgctggtcctgcgcaacggcacgaagatcgtcggcgtgaacaccggcccggtgtcgtctgacaacttctgtgccgacttgggacgccaatacgctcggcagcacgcggtcgatcaggtctggccgcttctgggctacgcgctgcgtgaccagcttgccgccgtccggcagttggagaccagagcctacgcggacggcacgacggcgactggtgtgccgccactgcctgtcgcctctcctgccaagcgggacatgaagttcggcgaggccctggaccacctgatctctggtggccgaatccaacgcgccgggtggaacgggaagggcatgttcctctggctcaacctcggctcccacgacgagcatgagcaggctgccgccatcggtggcgtgccccgcgccctgttcatgctgggggacgatggaaccgtcacccggatgccgaacatcaacatgcgtgcggccgatggctctaccgtgaccggatggctcgccagccagaccgacatgctggcctgtgactggcgggtggcgtga

SEQ ID NO: 842 - DNA, 273 bp, synthetic construct
  misc_feature 1..273: note = NA sequence of anti-defense homologs identified (more details in the specs)
  source 1..273: mol_type = other DNA
atgaaatttggtcaagcacttgatttgatgaagcaaggtgaaaaggcatttcgtttaggttggaatggcaaaggaatgtttacagtttatcaaaagggctaccctgatgggattccatgcaacaagcaaacagcatctgcatggggattaaatgaaggtgacttgtttaaagttcaaccatacctacagattcgcacagcacaaggcgatcatgcaatgtgggttccatctacaggtgacattttagccgaagattgggagattattagatga

SEQ ID NO: 843 - DNA, 513 bp, synthetic construct
  misc_feature 1..513: note = NA sequence of anti-defense homologs identified (more details in the specs)
  source 1..513: mol_type = other DNA
atggaaacgttcatcggaacgaagctgatcaaggccgtcgccatgacgcgcctcgcctataacgactatcgcggctggacgctgcctgccgatgaggacggcaacgatccgggcttcctggtcgaatacatcgacggcggccggtccaaccatcccgaccatgaaggctatatcagctggtcgcccgccgacgtgttcgagaaatcgtaccgcctgcacgatcagttgacgttcggcgaggcgctcgaagccctgaaagccggcatgcgcatcgcccgcgccggctggaacggcaaggatatgtgggtcgcgctgtccgggccgttggaggggcgcacgatcgccttcgagaatttctggtcgaagccgtgcagcgagtttgcccgatacaatggcggctccgcaaccgtgttgccgtgcatcaacatgaagaccgccgacggcaaaatcctgatgggttggctcgccagccagacggatatgctcgccgacgactgggtcatcattccctga

SEQ ID NO: 844 - DNA, 294 bp, synthetic construct
  misc_feature 1..294: note = NA sequence of anti-defense homologs identified (more details in the specs)
  source 1..294: mol_type = other DNA
atgacgcaggttctgaatgaaggcctttcgtttggcgatgccatcaaggcgctcaagcaaggtcgacgtgttgcccgcgctggctggaatggcaagggcatgtggctcgttcttgacccaggctcgacagtaggtgaggtgcgtcccggtagcgcctaccacaaggccggcgtgaccggctcgttcaccatcaacccgcatatcgacatgaagaccgcgaccggcgaaatgcagcctggctggctcgcctcgcagactgacatgctggctgacgactgggtaatcttggagtag

SEQ ID NO: 845 - DNA, 462 bp, synthetic construct
  misc_feature 1..462: note = NA sequence of anti-defense homologs identified (more details in the specs)
  source 1..462: mol_type = other DNA
atgaacttcggtgacgccatcaaagaattgaagctgggcaagcgcctgcaacgtaccggctggaacggcaaaggcctgttcatctatttggttcctgctgccagctacccagcgcagacaggtgcagccaaagcacattttggcgagggcgcgatggtgccctatgcggcttacctggccctcaagaacgtggacgagacagtctccacctgggcgccgagcatcaatgacaccctggccgaagactggcaggtagtgggttgcacggtcccgccccatcagcagcgcgtgctggatgagaagcaggagctggacatccgaatcaccaggctggacgagttcattctgcgcaatgccttgttccgcgagctggaccctgaagagcaggcccgcatgcgccgccagcttgatgtgatgcgcgagctgtctgtgattctgggcgagcgcatttcagctttctga

SEQ ID NO: 846 - DNA, 420 bp, synthetic construct
  misc_feature 1..420: note = NA sequence of anti-defense homologs identified (more details in the specs)
  source 1..420: mol_type = other DNA
atggtagtaatgattcacagcaaatatgggtacgagccgcctgaatgggtgcaggctgatgctcggctagataggtggtacaaggataagaagcgtcgtgctaaacagcatggcgcttttcgtttggataaaaataatgaggaagcaattatgaattttggtgaagcaattaaggcgttgaaattgggtaagcgtgttgcacgtaagggttggaacggcaaaggcatcttcattaaattgaaaaagggagaacctttgaacactcccaataatcgttttaatgaggttatgactcacgatttcatttatattgacacgactgggctacgcacgaacaatccgaatgcacctatggatcgagttccatggttagctagtcaaactgatatgctagctgatgactgggtcgtggtcgaataa

SEQ ID NO: 847 - DNA, 276 bp, synthetic construct
  misc_feature 1..276: note = NA sequence of anti-defense homologs identified (more details in the specs)
  source 1..276: mol_type = other DNA
atgtatttattatctgatgaattcagagaagcgctgctatcaaagaaacgtttagcgcgtaaaggatggaacggaaagaaaatgtttgtcgtgcatcaatcggcatatcctaacggaattccgatcaataagaatacagcagaagcaactggactttctgaaggtacagtatgcaaattcttaccatatgtaatgatgaaaacggctgataattcatttgttccttggttagcgagtcaaactgatttattagctaatgattgggaagtggtttga

SEQ ID NO: 848 - DNA, 462 bp, synthetic construct
  misc_feature 1..462: note = NA sequence of anti-defense homologs identified (more details in the specs)
  source 1..462: mol_type = other DNA
atgaatttcggtgacgccatcaaggaattgaagctgggcaagcgcctgcaacgtaccggctggaacggcaaaggcctgttcatctatctggtgcctgctgccagctacccagcgcagacaggtgcagccaaggcgcattttggcgagggcgcgatggtgccctatgcggcttaccttgccctcaagaacgtggacgagacagtcagcacctgggcgccgagtatcaatgacaccctggccgaagactggcaggtagtgggttgcacggtcccaccccaccagcagcgcgtgctggacgaaaagcaggatacggacatccgtatcaccaggctggacgagttcattctgcgcaatgccctgttccgcgaactggaccccgaagagcaagcccgtatgcgccgtcagctcgatgtgatgcgcgagctgtctgtgatcctgggcgagcgcatctctgctttctaa

SEQ ID NO: 849 - DNA, 270 bp, synthetic construct
  misc_feature 1..270: note = NA sequence of anti-defense homologs identified (more details in the specs)
  source 1..270: mol_type = other DNA
atgacttttggcacggcgattgatcagctaaagcaaggaaacagggttgcccgtaaagggtggaacggcaaaggcatctttatcaaattgaaaaaaggcgattctttaaacactccaaataaccgctctgatgaagtcatgacgcatgatttcatttatattgatacaactggattacagacaaataaccctaatgcgcctagagaccgcgttccgtggttagcaagccaaacagatatgcttgccgttgactggtatgttatcaaataa

SEQ ID NO: 850 - DNA, 267 bp, synthetic construct
  misc_feature 1..267: note = NA sequence of anti-defense homologs identified (more details in the specs)
  source 1..267: mol_type = other DNA
atgtttgaaaaactaaattttggtgatgctattaaggcattaaaagcagggaaatcagtcgctcgcaccggctggaatggtaaaggaatgttccttttcctcgtagctgggcaagaaattgcaaaaggaactaaatttgggtttgggcaatatgaaggtgagcctgactggaatgatttcatcgcgatgaagactgccgataacaaattagtcccatggttagcaagtcaaactgatgtacttgctgaagactggcaaattgtttag

SEQ ID NO: 851 - DNA, 276 bp, synthetic construct
  misc_feature 1..276: note = NA sequence of anti-defense homologs identified (more details in the specs)
  source 1..276: mol_type = other DNA
atggatttaactattggtgattttggttgggcattgcatcggttaaaagaaggagaaagggtatttcgttccggatggaatggtaaagggatgtttctgtatctggttaacgggaacgatttttctaccgcgtttagatatggatatggagagtatgcaggggaaccgcgatttgaggattcaattgctattaaaaccgcgcagaatacaatatccgtaggttggaagccaaccaacttggatatgttcgcaaatgactgggaggttgtagaataa

SEQ ID NO: 852 - DNA, 276 bp, synthetic construct
  misc_feature 1..276: note = NA sequence of anti-defense homologs identified (more details in the specs)
  source 1..276: mol_type = other DNA
ataatgaattttggaaaagcactcgaattaatgaaaagtggcaataagttgtcacgtaaaggttggaacggtaagaatatgtttgctgtttatcaaaaaggatatcctgatggaattccttgtaataaacaaacggcagaagcttggggattaaatgaaggtgatttatttaaggtacgaccttacttgcaattacgttgtgctgatggcactcatgcgatgtgggttccaagtgtatctgatattttagctgaagattggatgattgttgaataa

SEQ ID NO: 853 - DNA, 357 bp, synthetic construct
  misc_feature 1..357: note = NA sequence of anti-defense homologs identified (more details in the specs)
  source 1..357: mol_type = other DNA
atgaatttcggtcaagccttggacgcgctcaaggaaggcaagcgcgtgagccggtcgggctggaacggcaagggcatgttcatctacctgcagtctggcagtttcgaccacgaattgctcggcttccagccgggcgccaaaccgatggtcggccatcccagcacaatcgacggcgtgtcgctcggccttttcgaggccggcgacaagggcacggtcacgcgcctgcccaatctcaacatgcgctcggccacgggcgcgacggtgaccggctggctggcctcacagaccgacatgctggccgaagattgggacgtggtaccgccggccgtgcaggctggcgcagctgcaggagtttga

SEQ ID NO: 854 - DNA, 270 bp, synthetic construct
  misc_feature 1..270: note = NA sequence of anti-defense homologs identified (more details in the specs)
  source 1..270: mol_type = other DNA
atgaatttcggaagtgcattagaattactaaaacaaggtagtcagttagctcgtgagggttggaatggtaagaacatgtttgttgtttatcaaaaaggatacccggatggcattccgtgcaataagcaaactgctgaagcgtggggattaaatgaaggtgatttgtttaaagtgcgtccttacttacaattacgctgtgcagatggaacgcatgcgatgtgggtaccaagtatttctgacatcttatccgatgattgggtagagctataa

SEQ ID NO: 855 - DNA, 462 bp, synthetic construct
  misc_feature 1..462: note = NA sequence of anti-defense homologs identified (more details in the specs)
  source 1..462: mol_type = other DNA
atgaagcgctacatcggaaccaaggtgatcaacgcccggcccatgaaccgggccgactacaacacccaccgcagttggccactggccgccgacgagaacggcgctgacgagggctatctggtcgaatgcctcgacggcggagcgcccaaccaccccgggcacgcgggctacatctcctggagccccaaggcccaattcgagaacgcctacacggccaccgagggcatgacctttggccaggccatttatgcgctgcgtatcggtttccgcgtggcccgggagggttggaacggcaagagcatgtggttgcatctggtcaaggactggaacggggacgtcggaggcctgcccctcgggtgcgagctgctcccgtggatcggcatgaagaccgcagacgacaagtttgtcccttggctggccagccagaccgacatgctggccctggactggggcgtcgtctaa

SEQ ID NO: 856 - DNA, 342 bp, synthetic construct
  misc_feature 1..342: note = NA sequence of anti-defense homologs identified (more details in the specs)
  source 1..342: mol_type = other DNA
atgttaacaccaattgaaacagccctaacctttgggcaagctgttgaagctttaaaagaaggtaaaatgatagctcgtgctggatggaacggaaaaggtatgtttgtatttcaaagaccagccgatgttttaagtagtgaaatacttccaaatgtaaagtctttaccacaaaaagtaaaagattattttgcagaaaacaaaaatcctacaggtgaggcatacggaataacattcacggcatatttatgcatgaaggcagccgatggctcaattgtaaacggatggttagcctcgcaaaccgatatgttagcagaagattggaacattgtagaaaacttataa

SEQ ID NO: 857 - DNA, 462 bp, synthetic construct
  misc_feature 1..462: note = NA sequence of anti-defense homologs identified (more details in the specs)
  source 1..462: mol_type = other DNA
atgaacttcggtgacgccatcaaagaattgaagctgggcaagcgcctgcaacgtaccggctggaacggcaaaggcctgttcatctatttggttcctgctgccagctacccagcgcagacaggtgcagccaaagcacattttggcgagggcgcgatggtgccctatgcggcttacctggccctcaagaacgtggacgagacagtctccacctgggcgccgagcatcaatgacaccctggccgaagactggcaggtagtgggttgcacggtcccgccccaccagcagcgcgtgctggatgagaagcaggagctggacatccgaatcaccaggctggacgagttcattctgcgcaatgccttgttccgccagttggaccccgaagagcaagcccgcctgcgccgccagctcgatgtgatgcgcgagctgtctgtgattctgggcgagcgcatttcagctttctga

SEQ ID NO: 858 - DNA, 420 bp, synthetic construct
  misc_feature 1..420: note = NA sequence of anti-defense homologs identified (more details in the specs)
  source 1..420: mol_type = other DNA
atggcagtaatgattcatagtaaatacgggtacgagccgcctgagtgggtacaagctgattcccggctagataagtggtgtaaggataagaagcgtcgtgctaaacagcatggcgcttttagtttggataaaaataaggaggaagcaattatgaattttggagaagtgcttgaagaattaaaacgaggtaattgtgttgcacgtaaaggttggaacggcaaaggcatcttcattaaattgaaaaagggagaatctttgaacactcccaataatcgttttaatgaggttatgactcacgatttcatttatattgacacgactggtctacgcacgaacaatccgaatgcacctatggatcgagttccatggtcagctagtcaaactgatatgctagctgatgactgggtcgtagtcgaataa

SEQ ID NO: 859 - DNA, 432 bp, synthetic construct
  misc_feature 1..432: note = NA sequence of anti-defense homologs identified (more details in the specs)
  source 1..432: mol_type = other DNA
atgtttgatattgagaaaatgaggatcgtccctatgacattgggaaagtattttgaatcaagaggctggtcagtaccttacgatcttccaaagactacgaaaggatataagattgaaaatgatgctggactgtcttgctggatgtcctatgaggaatttagggataagtataaggaatacatggggttgagcttctccagtgctctggagctgttaaaacaagggtgtgcagttgcccgggaaggctggaacggtaaaggtatcttcatcgttttgcaaaagccggacgctaacagtaaaatgacacatccatatatctacatagatacgatggaactggtgactgacagtgaccttgctccgaaggatcgtgtgccttgggttgcatcacaaacggatctgctggctgaggattgggtaatcgtattataa

SEQ ID NO: 860 - DNA, 471 bp, synthetic construct
  misc_feature 1..471: note = NA sequence of anti-defense homologs identified (more details in the specs)
  source 1..471: mol_type = other DNA
atgacccaacatattggcgtgaaactgattaacgcttttccgatgacccgcctggcctacaacgattttcgcggctggcagctcccatctgacgagaacggcgcggatgaaggttatctggttgaatatctggacggcggaaaacctaacaccgatcgctttgatggatatgttagctggagtccgaaagaagtattcgaaaaagcttatcgcccggtatcagggttaagttttggccttgccattgaagcgctcaagcagggtaagaaagttgcccgcgttggctggaatggtaaggggatgtatctgttcattatccagcagaatgcttgggggtttgagtgtgacctggacggagttaatggccttgtgacgctgccatgcatttgcatgaagacagcggacgataaattagtgccgtggctggctaatcagaccgatattctggccgaagactggcaagtcgtttaa

SEQ ID NO: 861 - DNA, 468 bp, synthetic construct
  misc_feature 1..468: note = NA sequence of anti-defense homologs identified (more details in the specs)
  source 1..468: mol_type = other DNA
atgaattttggacaagcaattgaaaaattaaaagcaggaaaaccagtagcacgtatgggctggaacgggaaagaccagtacgtctacatgatcacaggcaaggagctatcaaaagggctgaaatacggctacggtgagtacgaaggcgaaccgcggtttacggacgttttagccatcaaaaccacagcaaatcaaattcaaacgggttggttggctagtcagtctgacatgctagctacggattggtttgaggtggatcagtcggaaaaaaagtacaacgtggtggctatcgaagaaattccagaaagagttgaagctcaattttggttccgtcttgaccacggtaaattaggtacatggtcaaagatgggcaataccgataaaggacagcagtggactgatgctcaaatcaaagactatggtctggaaggcttcgaaaaaattgaggtgaaaccgcgtgctgactaa

SEQ ID NO: 862 - DNA, 318 bp, synthetic construct
  misc_feature 1..318: note = NA sequence of anti-defense homologs identified (more details in the specs)
  source 1..318: mol_type = other DNA
atgtacttgcgtttgtcaatgacaggcgcttttcttatgctcaaaggagggcagaaaatggattttggacaagcacttacacaagtaaaattaggaaaaagtattaaaagaaaagggtggaatggtaaaaatcaatttgtttatttgataaaaggtagagatttgcagaagggtttgcattatggctttggagaatatttaggagagccaactataacggacactttggcaattaaaacaacaagtaaccaaattcaagtcggttggttagctagtcaaagtgatatgttatcaaacgactgggaagtaattgaataa

SEQ ID NO: 863 - DNA, 273 bp, synthetic construct
  misc_feature 1..273: note = NA sequence of anti-defense homologs identified (more details in the specs)
  source 1..273: mol_type = other DNA
atgaaatttggtcaagctttggatttgatgaagcaaggtgaaaaagcgtttcgctcgggttggaatggtaaagggatgtttgctgtttatcaaaagggttatccagaaggtattccttgtaacaagcaaacggctgaagcatgggggatgaatgagggggatttatttaaagtccgtccatatcttcagttaaaaaccgcacagggtgaccatgctatgtgggttccgagtatttctgacattcttgcagaggattgggagatcattaagtaa

SEQ ID NO: 864 - DNA, 507 bp, synthetic construct
  misc_feature 1..507: note = NA sequence of anti-defense homologs identified (more details in the specs)
  source 1..507: mol_type = other DNA
atgaaatttggagaagctcttgaggcagttaaatccggcgcaaagatttaccgtgaaggctggaatggcaaaggtcagtttgtcattaaggcaggtggatacaccgtcagcgaacctcgccccggcagtgattatgcaaaggcggggatcactggtgaatttactattgcgccacacctcgacctgaaaaacgcacaaggcattatgcaaccgggctgggttccgtcgatgggcgatttattcgctgatgattggctggcaacgccagtcattcacgaccacgcttgcatcaactgctttaccggcaaaggcccttgcctcggtgattgcaacgtgactgataccaataagtcgatggctctatcattcgaagatgtagttaaacctgtaattaaatggctgaatgaaaacgctaacccgcatgccttggtaatcattgatgtaaccaacgctacgctactcattggggaaataggcattcgcacagaaaaatatttaaaagactaa

SEQ ID NO: 865 - DNA, 471 bp, synthetic construct
  misc_feature 1..471: note = NA sequence of anti-defense homologs identified (more details in the specs)
  source 1..471: mol_type = other DNA
atgacccagcatattggcgtaaaactgattaacgcctttctgatgacgagacaggcatataacgattttcgtggctggcagcttcctgccggagaaaacggcgaggatgaaggctatctggttgaatatcttgatggcggaaaacctaacaccgatcgctttgatggctacgttagctggagtccaaaagaagtattcgaaaaggcttatcgtccggtatcagggctaagtttcggccttgccattgaagcgctcaagttggggaataaagttgcccgtgctggctggaatggtaaggggatgtatctgttcattatccagcagaatgcttgggggtttgagtgtgacctggacggagttaatggccttgtgacgctgccatgcatttgcatgaagacagcggacgataaattagtaccgtggctggctagtcagactgatgttctgtccgaagactggcaaatcatttaa

SEQ ID NO: 866 - DNA, 528 bp, synthetic construct
  misc_feature 1..528: note = NA sequence of anti-defense homologs identified (more details in the specs)
  source 1..528: mol_type = other DNA
atgagcaaattattagcacaatctttatgcgcatatattggcactaaatcagtattagctactcaaatgacgcgtggagaatataacgaatatcgcgggtggcaaattcctgaaaatgaagatcctacagaacaaggctatttggttgaatatgtagatggcgggaagccaaatgatgagcgtcatgcaggatatatctcttggtcacctgctgatgtatttgaacgtagttataagccgccaaaactaaactcaaaccttacctttggcgaagcattagaacatctaaaaaaaggttcacgagtcgctcgtcttggttggaatgggaagggaatgtggctaatacttactaaaggccgtgtagttgaaaaccttgagccaaatagtttttatgagaaaagtggttttaaggctccagtaactatttgtagtcatattgatatgaaggcagctgatggatcaatggttattggttggcttgctagccaaacagatatgttagctgaagactggattgttcttagttaa

SEQ ID NO: 867 - DNA, 480 bp, synthetic construct
  misc_feature 1..480: note = NA sequence of anti-defense homologs identified (more details in the specs)
  source 1..480: mol_type = other DNA
atgacccagcatattggcgtaaaactgattaacgcctttccgatgacgagacaggcatataacgattttcgtggctggcagcttcctgccggagaaaacggcgaggacgaaggctatctggttgaatatctggatggcggaaaacctaacaccgatcgctttgatggctacgttagctggagtccaaaagaagtattcgaaaaggcttatcgtccggtatcaggactaagtttcggccttgccatggaggcgttaaaacagggcaagagtttgcagcgggcaggatggaatgggaaagaccagtttgtttatctcgtgaaaggggaaaaattagcgtctgcgttgggttatggctttggcgaatatgttggcgagccaactttcaatgacacgcttgtattgaaaaactcacagaaccgccttgctacgtgggttccatccattggcgacctgatggctgaagactggcaaatcatttaa

SEQ ID NO: 868 - DNA, 333 bp, synthetic construct
  misc_feature 1..333: note = NA sequence of anti-defense homologs identified (more details in the specs)
  source 1..333: mol_type = other DNA
atgaagcgtcgtgctaaacagcatggcgcttttcgtttggagaaaaataaggaggaagcaattatgaattttggagaagtgctggaagaattaaaacgaggtaattgtgttgcacgtaaaggttggaacggcaagggcatcttcatcaaattgaaaaagggagaatctttgaacactcccaataatcgttttaatgaggttatgactcacgatttcatttatattgacacaactgggctacgcacgaacaatccgaatgcacctatggatcgagttccatggttagctagtcaaactgatatgctagctgatgactgggtcgtagtcgaataa

SEQ ID NO: 869 - DNA, 522 bp, synthetic construct
  misc_feature 1..522: note = NA sequence of anti-defense homologs identified (more details in the specs)
  source 1..522: mol_type = other DNA
atgacaaaagttaaattaccgcagtaccaaagcattaaaatcgtggaagcggctgagattgcgaaaatcgaggggcagacaatgctgctatccttccgcaagcatgtggcaaaagtcgaagtagatcagacttatctcgacaagcaccagcctcaagttggtggatatttcgtccgctatgaaaacggttatgagtcctactcgccaaaagagccgtttgaatcgggctatttgtcagtcgaaaccactattcacgccgccagggtaggtgcatcttttggcatcgcaatcgagatgctgaaagatggccatcgcgtagctcgcaaaggttggaacggcaaaggtatgttcttgcgcatggtgtccggcaaacaatacgacgtcgcttgcggcattgctcgtgatctggagctggcgccctggattggtatgaaaacagctgacggcaaatttgtgccatggctggcatcccagactgacatgctggccgaggattgggtaattgtggagatggtgccgtga

SEQ ID NO: 870 - DNA, 258 bp, synthetic construct
  misc_feature 1..258: note = NA sequence of anti-defense homologs identified (more details in the specs)
  source 1..258: mol_type = other DNA
atggattttggagacgcattgaaactgatgaaacaaggaagttatgttgctcgaaaaggttggaatggtaaaaatatgtacattggcattacttatccagatatcgacaacagagctactaaaccttacatttctatgaaaactgctgataatgaaattatcccttggctagcaagtcaaacagacgtattagctgatgattggtttgaagtgccttatcgtaatgacatgcttttgttgtcagcgcaaacttattaa

SEQ ID NO: 871 - DNA, 270 bp, synthetic construct
  misc_feature 1..270: note = NA sequence of anti-defense homologs identified (more details in the specs)
  source 1..270: mol_type = other DNA
gtgaactttggcgaagcgatcgaagcgatcaaggcgggaatgcctgtatgtcgctctggctggaatggcaaaggcatgttcttggtctacgtccccggcaccccgcaagtcgcatccaaagccggctcgccgtaccgtgctaccggcatcaccaaagccgacataggcccgcacatcgatatgttcacggcttccggctgctttcagccgggctggttggcgtcacaagccgacgtgctggccgacgactggcagatttttaccaagtga

SEQ ID NO: 872 - DNA, 264 bp, synthetic construct
  misc_feature 1..264: note = NA sequence of anti-defense homologs identified (more details in the specs)
  source 1..264: mol_type = other DNA
atgaattttgggcaagcacttgaggcactgaagctggggcagaaagtatcccgtgacggctggaatggcaagggcatgtttctgtttctcgtacccggcagcatattcaaagtaaataggccgcctctgcttggcatttataccgaaggcaccgaaatcaagtatcacgcgcatgtcgatatgaaaaccgcccaaggtgacgttgtgccctggctgtgctcacagaccgatatgctggccgaagactggggtgtggtcccttga

SEQ ID NO: 873 - DNA, 525 bp, synthetic construct
  misc_feature 1..525: note = NA sequence of anti-defense homologs identified (more details in the specs)
  source 1..525: mol_type = other DNA
atgtctgaagtctactacggcacgaagcagatcaaagccgtacctatgaaccggcaggcgtacaacgactatcgcggctgggagctgcccgcagatgaagacggtagcgatgccggttttttggtcgaatatgtagatggcggcgcctccaatcatcccgatcatgaaggctatatcagctggtcgcccgctgatgtttttgagcgggcctatcagtcgtccgggagcatgaattttggccatgcgctccaagccgtcaaagaaggccatcgtgttgctcgggcgggctggaacggcaagggaatgttcattgtcctgatgccgcgcttggagctcccgccgttcaacactcaaggcacggcccgaaaggtgaatgatcgcaccgcgaaatggattggtgaggaaactcctctcgactgtcagccttatttggccatgtggactgcggacaagaagtggcagcccggctggcttgcctcccaggccgatatgctggccgatgattggcttatcgttgcggattaa

SEQ ID NO: 874 - DNA, 426 bp, synthetic construct
  misc_feature 1..426: note = NA sequence of anti-defense homologs identified (more details in the specs)
  source 1..426: mol_type = other DNA
atgacatttagtgaagcactagaacaactcaaattaggcaagaaattgaaacgtaaaaattggaatggtaaaaatcaatttatcttcttaattgatagagattttttagaagatattcttcgcggtggcacagatgaaaagtggggagatagaccatggaaagagaatgctttcttaaattcattagaagttactgaatttaatgtcactgatttattagccattaagacaacagctaatcagcttcaactagggtggttagcaagtcaaacggacatgttatctgatgattgggaagtaattgataacagtctaaaagaggttaaaacagaagattcagcaattggatcggacaatgccgcagctagtgcgataaataatccagtaaagcacgcaatccataattcatttatgccaggtgcctaa

SEQ ID NO: 875 - DNA, 525 bp, synthetic construct
  misc_feature 1..525: note = NA sequence of anti-defense homologs identified (more details in the specs)
  source 1..525: mol_type = other DNA
atgactaaacatattggcgtcaaattaattaatgcgttccctatgacccgccacgagtataacgctttccgcggctggcagcttcctgccgacgagaacggcgcggatgaaggctatctggttgagtatctggatggcggaaaacctaacaccgatcgctttgatggctacgttagctggagtccgaaagaggtattcgaaaaggcttaccgtccggtatcagggctaagtttcggccttgccattgaagcgctcaagaagggtaaaaaagctgcccgcgctggctggaacggtaaggggatgtggttggcatatgttaagccgcacagtgaagccgttcacactggcaacactccttgcttttgcagtcgcgtctttgagttgccggaggggacgcagggagacccgaaacgcgctccggaacaactgccgtatattgccatgaaaacagcggacgataaattagtgccgtggctggctagtcagactgatgtcctagccgaagactggaacatcgttgagtaa

SEQ ID NO: 876 - DNA, 522 bp, synthetic construct
  misc_feature 1..522: note = NA sequence of anti-defense homologs identified (more details in the specs)
  source 1..522: mol_type = other DNA
atgacaaaagttaaattaccgcagtaccaaagcattaaaatcgtggaagcggctgagattgcgaaaatcgaggggcagacaatgctgttatccttccgcaagcatgtggcaaaagtcgaagtagatcagacttatctcgacaagcatcagcctcaagttggtggatatttcgtccgctatgaaaacggttatgagtcctactcgccaaaagggccgtttgaatcgggctatttgtcagtcgaaaccactattcacgccgccagggtaggtgcatcttttggcatcgcaattgagatgctgaaagacggccatcgcgtcgctcgcaaaggctggaacggcaaaggtatgttcttgcgcatggtgtcaggcaaacagtacgacgtcgcttgcggcattgctcgtgatctggagctggcgccctggattggcatgaaaacagctgacgggaaatttgtaccatggctggcgtcccaaaccgacatgttggccgaggattgggtgattgtggaggtcgcgccgtga

SEQ ID NO: 877 - DNA, 309 bp, synthetic construct
  misc_feature 1..309: note = NA sequence of anti-defense homologs identified (more details in the specs)
  source 1..309: mol_type = other DNA
atgacatttagtgaagcactagaacaattgaagcaaggcaagaaattgaagcgtaagaattggaacggcaaaaatcaatttatctttttaattcatggtgaaaatattcaagcggcatattcagcatggatgagtgattattggacagataatgatcctgatgatgatattctttcacacttcattgacagtggtgacattagttttcctgactttttggcaatcaaaacaacatcaaatcaaatccaattaggatggttagcaagtcaaacagatatgctatctgatgattgggaggtagttgaatga

SEQ ID NO: 878 - DNA, 264 bp, synthetic construct
  misc_feature 1..264: note = NA sequence of anti-defense homologs identified (more details in the specs)
  source 1..264: mol_type = other DNA
atgttttcgttttctgacgccctgaaccacctcaaatccggcaagaaggtcgcccgatccggctggaacggaaagggtatgttcgtgtttcttgttcccggtagcaccttcaaggtcaaccgcgccccgttgctcggcatctatccagaagggaccgaaatcaactattgcccccatatcgacatgaagaccgccgacgacaagattgtgccctggctggcctcgcagaccgatgtgctggccgacgactggaccctggtgtga

SEQ ID NO: 879 - DNA, 528 bp, synthetic construct
  misc_feature 1..528: note = NA sequence of anti-defense homologs identified (more details in the specs)
  source 1..528: mol_type = other DNA
atgagcaaattattagcacgatctttatgcgcatatattggcactaaatcagtattagctactcaaatgacgcgtggagaatataacgaatatcgcgggtggcaaattcctgaaaatgaagatcctacagaacaaggctatttggttgaatatgtagatggcgggaagccaaatgatgagcgtcatgcaggatatatctcttggtcacctgctgatgtatttgaacgtagctataagccaccaaaactaaactcaaatcttacgtttggcgaagcattagaacatctaaaaaaaggtgaaaaagttgctcgtcttggttggaatgggaagggaatgtggctaatacttactaaaggccgtgtggttgaaaaccttgagccaaatagtttttatgagaaaagtggttttaaggctccagtaactatttgtagccatattgatatgaaggcagctgacggatcaatggttattggttggcttgctagccaaacagatatgttagctgaagactggatggttcttagttaa

SEQ ID NO: 880 - DNA, 273 bp, synthetic construct
  misc_feature 1..273: note = NA sequence of anti-defense homologs identified (more details in the specs)
  source 1..273: mol_type = other DNA
atgaattttggccaagcaattgaagcagttaaaaatggtgaaaaaattgcacgaagaggttggaatggtaaaaacatgtttgttgtttatcaaaaaggatatccagagggaattccttgtaataaacaaaccgctgaagcatggggattaaatgaaggcgatctttttaaagtgagaccatacttacaattacgttgtgcggatggaacgcatgcaatgtgggctccaagtacttcagatgcattagcggaagactgggaggttgttgagtaa

SEQ ID NO: 881 - DNA, 360 bp, synthetic construct
  misc_feature 1..360: note = NA sequence of anti-defense homologs identified (more details in the specs)
  source 1..360: mol_type = other DNA
atgggtagttttgcaggttgtcagttatgtgaagcatgtgaaaaaactatgattgatactggtgttatcggtctaatttttgaagaaaagattaaatctaaagcggaattgaatttcggtgcagcattaactttcttgaaagaggggttaagagtagctcgtaaaggttggaatggtaaagggatgtggttgtggcaagtagattcatggggtggcaatattaagagtgcgtcgccagacccattcgtatatttagaagcgtccccattcattgctatgaaaacgacggatgacaagctagtgccttggttagcttctcagactgatattcttgcagtagattgggaggtagttgaataa

SEQ ID NO: 882 - DNA, 276 bp, synthetic construct
  misc_feature 1..276: note = NA sequence of anti-defense homologs identified (more details in the specs)
  source 1..276: mol_type = other DNA
atgaaatttggcgaagctcttgagacagttaaatctggcgcgaagatttatcgcgaaggctggaacgggaaaggtcagtttgtcattaaggcaggtggatacaccgtcagcgaacctcgccccggcagtgattatgcaaaggcggggatcactggtgagtttaccattgcgccacatctcgacctgaagaacgcacaaggcagtattcagcctggctgggttccgtcgcagggcgatttgttcgctgatgactggttggctgagccagtagcgtag

SEQ ID NO: 883 - DNA, 471 bp, synthetic construct
  misc_feature 1..471: note = NA sequence of anti-defense homologs identified (more details in the specs)
  source 1..471: mol_type = other DNA
atgacccagcatattggcgtaaaactgattaacgcctttccgatgacgagacaggcatataacgattttcgtggctggcagcttcctgccggagaaaacggcgaggatgaaggctatctggttgaatatcttgatggcggaaaacctaacaccgatcgctttgatggctacgttagctggagtccaaaagaagtattcgaaaaggcttatcgtccggtatcagggctaagtttcggccttgccattgaagcgctcaagttggggaataaagttgcccgtgctggctggaatggtaaggggatgtatctgttcattatccagcagaatgcttgggggtttgagtgtgacctggacggagttaatggccttgtgacgctgccatgcatttgcatgaagacagcggacgataaattagtaccgtggctggctagtcagactgatgttctagcagaagactggcaaatcatttaa

SEQ ID NO: 884 - DNA, 675 bp, synthetic construct
  misc_feature 1..675: note = NA sequence of anti-defense homologs identified (more details in the specs)
  source 1..675: mol_type = other DNA
atgacgcagttccgaaagaagcccgtagtgatcgaggcgtggcctgcccatgagttgatccatgcggcaagtcgcgactggcaggctctgcccaaggcggtggccgatgcctatgagaagggtggatgggtgttccagttcgatgggatttacatcccgacccttgaagggtcgatgcgtgcggagcgcaccgacatggttattcgcggcgtgcagggagagttctacccgtgcaagccggagatcttcgcagagacctacgaccgcgtggaggcgaccgcgtggaggcgtaacgatgcgctaccacccactgacgctcgccatctggcgggtattcgcaacctggagcaagtgatgaacgagaaagtcaccccgccgtctcccgctgaattcaccttcggccttggcttcggcagcgcactggatcacctgaaggagggccgtcgcgtggcccgcgatggctggaacggcaagggcatgttcgtctacctcgtgccgccggccagctatgccgtgcagaccggcgcagctaaagcccatttcggcgaaggctcgatggtgccgtacaacgcctacttcgccatcaagaacgtcaacgacaccgtcagcacgtgggttcccagcgtcaacgactgcctggccgacgactggtatgtgctgcaggaggagggctaa

SEQ ID NO: 885 - DNA, 480 bp, synthetic construct
  misc_feature 1..480: note = NA sequence of anti-defense homologs identified (more details in the specs)
  source 1..480: mol_type = other DNA
atgacccagcatattggcgtaaaactgattaacgcctttccgatgacgagacaggcatataacgattttcgtggctggcagcttcctgccggagaaaacggcgaggacgaaggctatctggttgaatatctggatggcggaaaacctaacaccgatcgctttgatggctacgttagctggagtccaaaagaagtattcgaaagggcttatcgtccggtatcaggactaagtttcggccttgccatggaagcgttaaaacagggcaaaagtttgcagcgggcaggatggaatgggaaagaccagtttgtttatctcatgaaaggggaaaaattagcgtctgcgttgggttatggctttggcgaatatgttggcgagccaactttcaatgacacgcttgtattgaaaaactcacagaaccgccttgctacatgggttccatccattggcgacctgatggctgaagactggcaaatcatttaa

SEQ ID NO: 886 - DNA, 285 bp, synthetic construct
  misc_feature 1..285: note = NA sequence of anti-defense homologs identified (more details in the specs)
  source 1..285: mol_type = other DNA
atggactttggtgaagcgctggtggcgctgaaagagggcaagcgcgtggcgcgcgaaggctggaacggcaaaggcacattcctgtttctggttgcgggcagcaatttcgtggtgaaccgagagccgctgctggcgatcatgggcgagggcacgatggtcacctatcgcccgcacatcgacatgaaggacgccgaggacaaagtggtgccctggctggcatcgcaaaccgacaggctggccgaggactggtgcgtcgtggagctcggcgctggcgatgctgcatga

SEQ ID NO: 887 - DNA, 330 bp, synthetic construct
  misc_feature 1..330: note = NA sequence of anti-defense homologs identified (more details in the specs)
  source 1..330: mol_type = other DNA
atgacatttagtgaagcattaggacaattaaaacaaggtaagagagtggcacgtaaaaattggaatggcaaagatcaatttgtgtttctagtaaaaggcgaagatgtttatggagcatacgctgctagatttgatgactatgagcatgttgatggatttgaaaatagcataatcactcaattaacttgtatcaatgcagatacggcaaagatcactgatttattagcaattaaaacaacatctaatcaaattcaactaggctggttagccagtcaaacagacatgttatctgacgattgggaggtgatcgaaaatgagcaatgtaattaa

SEQ ID NO: 888 - DNA, 480 bp, synthetic construct
  misc_feature 1..480: note = NA sequence of anti-defense homologs identified (more details in the specs)
  source 1..480: mol_type = other DNA
atgacccagcatattggcgtaaaactgattaacgcctttccgatgacgagacaggcatataacgattttcgtggctggcagcttcctgccggagaaaacggcgaggacgaaggctatctggttgaatatctggatggcggaaaacctaacaccgatcgctttgatggctacgttagctggagtccaaaagaagtattcgaaaaggcttatcgtccggtatcagggttaagtttcggccttgccatggaagcgttaaaacagggcaaaagtttgcagcgggcaggatggaatgggaaagaccagtttgtttatctcgtgaaaggggaaaaattagcgtctgcgttgggttatggctttggcgaatatgttggcgagccaactttcaatgacacgcttgtattgaaaaactcacagaaccgccttgctacatgggttccatccattggcgacctgatggctgaagactggcaaatcatttaa

SEQ ID NO: 889 - DNA, 300 bp, synthetic construct
  misc_feature 1..300: note = NA sequence of anti-defense homologs identified (more details in the specs)
  source 1..300: mol_type = other DNA
atggatttcggaaaagccttggacgcgctcaaggaaggcaagcgcgtgagccgatccggctggaatggcaagggcatgttcctgttcctcgtcgccggctccaacttcaccgtcaaccgagagccgctggcgtcgatcgtcggcatgggctccgaaatcacctatcggccgcacatcgacatgaaagacgccgaaggcaaggtggtgccgtggctggcctcgcagaccgacatgctggccgaagattgggacgtggtgtcgctggccgtccaggccgaccgcgtgaaagtggaggtttag

SEQ ID NO: 890 - DNA, 261 bp, synthetic construct
  misc_feature 1..261: note = NA sequence of anti-defense homologs identified (more details in the specs)
  source 1..261: mol_type = other DNA
atgaactttggaaaagcaattgaggctctaaagcaaggatacaaagttgctcgcaaaggttggaatggtaaaaatcaatacatacaatatattccaagcaaaatattgaacaaacagctgaaacatgacgaaaagtacacattttctgatgtgttggcaatcaaaacgtcaaatgatgttattcaagtaggctggcttgcaacacaaaccgatatgcttgctcaagactgggaaatactgcccgcaatggctataaactaa

SEQ ID NO: 891 - DNA, 522 bp, synthetic construct
  misc_feature 1..522: note = NA sequence of anti-defense homologs identified (more details in the specs)
  source 1..522: mol_type = other DNA
atgacaaaagttaaattaccgcagtaccaaagcattaaaatcgtggaagcggctgagattgcgaaaatcgaggggcagacaatgctgttatccttccgcaagcatgtggcaaaagtcgaagtagatcagacttatctcgacaagcaccagcctcaagttggtggatatttcgtccgctatgaaaacggttatgagtcctactcgccaaaagagccgtttgaatcgggctatttgtcagtcgaaaccactattcacgccgccagggtaggtgcatcttttggcatcgcaatcgagatgctgaaagatggccatcgcgtagctcgcaaaggttggaacggcaaaggtatgttcttgcgcatggtgtccggcaaacaatacgacgtcgcttgcggcattgctcgtgatctggagctggcgccctggattggtatgaaaacagctgacggcaaatttgtgccatggctggcatcccagactgacatgctggccgaggattgggtaattgtggagatggtgccgtga

SEQ ID NO: 892 - DNA, 258 bp, synthetic construct
  misc_feature 1..258: note = NA sequence of anti-defense homologs identified (more details in the specs)
  source 1..258: mol_type = other DNA
atggactttggttcggcattagaattattaaagcaaggcgaaagagttgcacgtgaaggctggaacggaaaagatatgtttttgtatttgattaaaggcaatgaattatctaagggattaaaatacggatatggtgagtatgtaggagaaccttcatttgtagatactgttgcaatgaaaaccgcacaaaatacaattgttgttggttggctagcttcacaatctgatatgttagcaaatgattggattgaattgtaa

SEQ ID NO: 893 - DNA, 525 bp, synthetic construct
  misc_feature 1..525: note = NA sequence of anti-defense homologs identified (more details in the specs)
  source 1..525: mol_type = other DNA
atgcaggaattttacggaaccaagcgcgtggccgccctgccaatgaccaggctggcctacaacgactatcgcggctggcagctgccccgtgacgaaaacggcgctgatgacggctacctggtcgaatacaagcacggcggcaaaggcaaccatcccgaccatgtcggctacatttcatggtcaccgaaagctcagtttgatgcggcccaccagccgaccagcgccatgagcttcgggcatgccattgcagcgctgaaagagggctaccgtgttgcccgctccggctggaacggcaaggggatgttcatctatctgcagaagggctcgtatgacgttcctccggacggaagcgtgcctcaccaggtcggcggcgtcccgttcccccttttcgacgatggcgaccacggcaccacgacgcgtatgccctgcatgtgcatgcgcgcggccgacggctcgatcgtcaccggctggctggcaagccagaccgatattctcgccgaggactggacgatcctggccgactga

SEQ ID NO: 894 - DNA, 441 bp, synthetic construct
  misc_feature 1..441: note = NA sequence of anti-defense homologs identified (more details in the specs)
  source 1..441: mol_type = other DNA
atgaatttcggacaagcacttcaagcactgaaagctggatacaaggtggcccgcattgggtggaatggcaaagggatgtttctaattcttatctcaggcactaaagatgtagaaccttgcgagggaacaccatacgcagatttagccgtttctccccaaggtattgtgactatcaacgcccacattgacatgaaaacagctactggtgaaatgcaaccaggctggctggcatcccaaacggatatgttagcagaggactggaccatcgtaggtaatgagacagtggtcaactccgttggtgagtatgaattgcctattgggcaaatcgtgaaagtcgatggtttcccatttgagttacgggaaccggtaagggcgctaagtggccagcatgtactggatgttctccgtgctgataagaacatagggattcaggctgtttaa

SEQ ID NO: 895 - DNA, 438 bp, synthetic construct
  misc_feature 1..438: note = NA sequence of anti-defense homologs identified (more details in the specs)
  source 1..438: mol_type = other DNA
atgacccaggattactatggcacgaaacgagtcaccgcatggccgcaggagcgcgctccgggtccgtatggaccgcgggagatgcaggacggttatgccgtcaaatacgaggacggctatacgtcctggtcccccagggcgacattcgaggcggcctatcagccggtcgttgccatgtcgtttgggcacgccattgtcgccatgaaggcggggcatcgcgtcgcgcgcgctggctggaatggaaaagggatgttcctattcctcgtgccagggtcagtgttccaggtgaaccggccgcctctcctgggtatctacccggagggaacggaaattcgataccacgcccacatcgacatgaaaacggcgcagggctacgtcgtgccatggctcgcgtcgcaggccgacatgctggccgacgactggacgatcatcgagtaa

SEQ ID NO: 896 - DNA, 333 bp, synthetic construct
  misc_feature 1..333: note = NA sequence of anti-defense homologs identified (more details in the specs)
  source 1..333: mol_type = other DNA
atgagtagatacgatgaaactcccggcgcgccgatgtgcgataccgcaagcgacattaaggcgaagatcgaggcgcgccaacttagcggcggtctcggcggctgctcgcaggccaacatgacattcggagatgcgctgcgcgtcttgaagcttggcgctcgcgtcggccgcttcggctggaatgggcgcggcatgtggctcgccctccaacggccggaccagagttccaagatgacgctgccctacatctacatgttcacggcgcagaatcagacggtgccgtggctggcgtcgcagaccgacatcatgtcggaggactggtacaccctttaa

SEQ ID NO: 897 - DNA, 258 bp, synthetic construct
  misc_feature 1..258: note = NA sequence of anti-defense homologs identified (more details in the specs)
  source 1..258: mol_type = other DNA
atgaaatttggtgaagcagtggatttacttaacgacggttataaaattacccggtctggatggaacggcaaaagaatgtttttgtatttaattaagggtagtgaattagctaaaggtttgaaatatggatatggcgagtatcgaggggaaccggtattcgacaactttatcgttatgaaaacagcaaataacaaaattgtcccgtggcttgcgtctcaaactgacatgctcgcagaagattgggagatcatcaaatga

SEQ ID NO: 898 - DNA, 468 bp, synthetic construct
  misc_feature 1..468: note = NA sequence of anti-defense homologs identified (more details in the specs)
  source 1..468: mol_type = other DNA
atgaattatgaagtaacatatgttgaaaatggacaggtgattaaaaagaaagtagaagatgttataaacgtaatgaactcgggtataagcattgaatttttaggtgcagaaggtgcggtgttaattataaataatcgtgacttcatgagtgctaaggaaattgttttgtgtggtaaagatgaaggagtacgtatgggcagtccggatttaggctctcgcgaagcggtagaagttggaatgaattttggacaagcgattgaagctttaaaagacggcaaaaaagtagctcgaaatggttggaatggtaagggtatgtggttaaaacttattccatctggtaacgccatgtttaagggttatcatatgaaggattgtattggtatgaaaacagctaacaacttaatgcaaccagggtggttagcgtcacaaatagaaatgttagcggaggattgggaaatagtagattag

SEQ ID NO: 899 - DNA, 480 bp, synthetic construct
  misc_feature 1..480: note = NA sequence of anti-defense homologs identified (more details in the specs)
  source 1..480: mol_type = other DNA
atgacccaacatattggcgtgaaactgattaacgcctttccgatgacgagacaggcatataacgattttcgcggctggcagcttcctgccgacgagaacggcgcggacgaaggctatctggttgaatatctggacggcggaaaacctaacaccgatcgctttgatggctacgttagctggagcccgaaagaagtattcgaaaaggcttaccgtccggtatcagggctgagtttcggccttgccattgaagcgctcaagcaggggaagagtttgcagcgggcaggatggaacgggaaagaacaatttgtttatctcgtgaaaggcgaaaaattagcgtcggcactgggttatgactttggcgaatatgttggcgagccaacgttcaatgacatgtttgtgctgagaaattcacagaatgaattgtgcgcttgggtaccgtctacgggcgacctgatggccgaagactggcaaatcgtttaa

SEQ ID NO: 900 - DNA, 471 bp, synthetic construct
  misc_feature 1..471: note = NA sequence of anti-defense homologs identified (more details in the specs)
  source 1..471: mol_type = other DNA
atgactaaacatattggcgttaaattaattaatgcgttccatatgacccgccaggagtataacgattttcgtggctggcaacttcctgccgacgagaacggcgcggacgaaggctatctggttgaatacctggacggcggaaaacctaacaccgatcgctttgatggctacgttagctggagtccgaaagaagtattcgaaaaggcttaccgtccggtatcaggactaagtttcggccttgctgttgaagcactcaagcagggtaagaaagttgcccgcaatggctggaatggtaaggggatgtatctgttcattatccagcagaatgcttgggggtttgagtgtgacctggacggagttaatggccttgtgacgctgccatgtatttgcatgaagacagcggacgataaattagtgccgtggctggctagtcagactgatgttctggccgaagactggcaaatcgtttaa

SEQ ID NO: 901 - DNA, 264 bp, synthetic construct
  misc_feature 1..264: note = NA sequence of anti-defense homologs identified (more details in the specs)
  source 1..264: mol_type = other DNA
atgaactttggagatgcacttgcctatcttaaagacggcaagcgtgtagcccgtgtgggatggaacgggaaggggatgttcctcttccttgtccccggttctacttttaaggtcaaccgcgcccctctccttgggatttacccggagggcacggagattaactaccacgcacatatcgacatgaagaccgctcaggacactgttgtcccttggttggcctcccagacggacgttctggcggaagattgggagcaggtagtttaa

SEQ ID NO: 902 - DNA, 501 bp, synthetic construct
  misc_feature 1..501: note = NA sequence of anti-defense homologs identified (more details in the specs)
  source 1..501: mol_type = other DNA
atgactaaacatattggcgtcaaattagttaatgcattccctatgaaccgtctggcgtataacgatttccgtggctggcaacttccgccagacgagaacggcgcagacgatggttatctggttgaatatctcgacggcggcaaacctaacaccgaacgctttgacggttacgtttcatggtcgccgaaagaggttttcgagaaggcttaccgcccggtatcaggtcttaattttggccttgccattgaagcgctcaaacagggtaagaaagtttcccgctctggatggaatggaaaaggaatgcatttgcagcttgttaagccgccacaatccgcaacgccaaatgattggcgatatgacgttacttgtggtgacgaatatacttttgtccccggggtaaaacttatgccgtggattggaatgaaaactgccgatgcttgctttgtcccgtggctggcaagccaaactgatgtattggccgaagactggcaaatcatttaa

SEQ ID NO: 903 - DNA, 528 bp, synthetic construct
  misc_feature 1..528: note = NA sequence of anti-defense homologs identified (more details in the specs)
  source 1..528: mol_type = other DNA
atgacccagcatattggcgtaaaactgattaacgcctttccgatgacgagacaggcatataacgattttcgtggctggcagcttccagccggagaaaacggcgaggacgaaggctatctggttgaatatctggatggcggaaaacctaacaccgatcgctttgatggctacgttatctggagtccaaaagaagtattcgaaaaggcttatcgtccggtatcagggctaagtttcggccttgccattgaagcgctcaagttggggaataaagttgcccgtgctggctggaatggtaagggtatgtggctggcatacgttaaaccgtacactgaggctgttcatactggcagtacgccttgcttttgcagtcgcgtctttgagttgcctgaaggtacgcatggagaaccgaaacgatctccgaaacaacttccgtatatcgccatgaaaacagcggacgataaattagtgccgtggctggctagtcagactgatgttctagcagaagactggcaaatcattaccatgtag

SEQ ID NO: 904 - DNA, 429 bp, synthetic construct
  misc_feature 1..429: note = NA sequence of anti-defense homologs identified (more details in the specs)
  source 1..429: mol_type = other DNA
atgcgacacactgagtatggctatgttagcccagcagagaaccattgctatcgtggcttagagcgttggttggctgataagaagaaacgcgagcgtcgtgcaaagaagcatggcgcttttaatttggatgaaaataaggaggaagcaattatggattttggcgaagcattagaagcgttgcatcatggtaaaaaggttgctcgtgaaggttggaatggtaaaggcatgtttatttatttggaaagtggaactctaatttccacagataggattcgtaacttggcgctcgctaagtctacccctgatagccagaaatatatcaatattaacccacatattgatatgaaagctgcagatggttcgattgttgtaggttggttagcaagtcaaacagacatgttagccaacgactgggagattgttaaatga

SEQ ID NO: 905 - DNA, 429 bp, synthetic construct
  misc_feature 1..429: note = NA sequence of anti-defense homologs identified (more details in the specs)
  source 1..429: mol_type = other DNA
atgcgacacactgagtatggctacgttagcccaacagaaaatcactgctatcgtgacttagaacgttggttggctgataagaagaaacgtgagcgtcgtgctaagaagcatggcgcttttagtttagataaaaataaggaggaagcaattatgaattttggtgaagcattagaagcgttgcgtcatggtaaaaaggttgctcgtgaaggttggaatggtaaaggtatgtttatttattttgaaagtggaactctaattaccccagataagattcgtaacttgacgctcgctaagtctacccctgacagccaaaaatatatcaatattaacccacatattgatatgaaatcagtagatggttcaatcgttgtaggttggttagctagtcaaactgatatgctagctaatgattgggtcgtagtcgaataa

SEQ ID NO: 906 - DNA, 387 bp, synthetic construct
  misc_feature 1..387: note = NA sequence of anti-defense homologs identified (more details in the specs)
  source 1..387: mol_type = other DNA
atgaattttggacaagcgttagaagcagtgaaaacaggagccaagattgcccgctccggttggaatggtaaagggcaattcgttatcaaagctgggggctatacagttgacgaggcccgcccaggttcagactatgcaaaagccggtatcgaggggaagtttcatatatccccgcatcttgatttgaaaaatgctcagggtgcaatgcaacccggatgggttcctagtcaaggggatttgtttgctgacgattgggtgattgccgatagtgatgagcattttcaacactttctgtcttatagcggattttacgatgaatcgcctgaagttatcgagaagctgaaaaaagcgtatttcgatgggggttacgctttgcagtggaaataa

SEQ ID NO: 907 - DNA, 441 bp, synthetic construct
  misc_feature 1..441: note = NA sequence of anti-defense homologs identified (more details in the specs)
  source 1..441: mol_type = other DNA
atgaatttcggacaagcaattcaagcactgaaagccggatataaagtggctcgcacagggtggaatggcaaaggcatgtttctaattcttatctcagggactaaagatgtcgtgccttgcgagggaacaccatatgcagccttggctgtttctccccaaggcattgtgaccatcaacccccacattgacatgaaaactgctacaggtgagatgcagccgggttggttggcctcccaaaccgacatgttagctgaagactggggcattgtaggtaatgagactgcggtcaactctgttggtgagtatgaattacctatcggacaaaccgtaaaaatagatggttacccatttgagctgcgggagccggtgagggcgctaagtggtcagcatgtcctggatgttctcagtgcggataagaacacagggattcaggctgtttaa

SEQ ID NO: 908 - DNA, 255 bp, synthetic construct
  misc_feature 1..255: note = NA sequence of anti-defense homologs identified (more details in the specs)
  source 1..255: mol_type = other DNA
atgaattttggagaagcattagaaaacttaaaacaaggtaaaaaagtagctagaaaaggttggaatggtaaaaagcaatatattgaacttgcaactgcaataaggtatgtaaatgcagatggaaaaataattaattgtaatcatgatgcaataggaaataaagcaattgcatttgttgaaacattaggcgtgcagatgggatggcttgcaagtcaagctgatatgttggcagaagattgggaggcggttgaataa

SEQ ID NO: 909 - DNA, 630 bp, synthetic construct
  misc_feature 1..630: note = NA sequence of anti-defense homologs identified (more details in the specs)
  source 1..630: mol_type = other DNA
atgaaggcgctgaactttggtcaggccatcgaggcactgaaggccgggctgcgcgtggctcgcgccgggtggaatggcaaagacatgtggctggcgctgagctgcaatggcacgcgagaagtgccggccgccgccttctgggctccgcccaaccgcgcttatgcagaggcgaatgggggcaaggcgaccgtgcttccctccatcaccatgaagaccgccaccggcgagatcctgatgggctggcttgcctcgcagactgacatgctggccgaggactggtccatcctcgatgccggcgccgccgctgcgctggccggcagcgcggaggtgggaaaggcggtgcctgagcctgcgccggcggccgtagccgccgagtggaagcccacagccggccgcatggtaaccgtgaagggctacatcgccaacggcaccgacgagcacccgggcatcatcacccgtgtgcatggggcaggcgagggcgcactggtcaatgtgaccgccttcccggacctccagtcgccgaagatcttcagcagcatccccgtctacaccagccgcaccgccgcacgcgacgccatcgttggcccgtcgcgcgccgccggctacgctttcttcccggatcgggtgtag

SEQ ID NO: 910 - DNA, 216 bp, synthetic construct
  misc_feature 1..216: note = NA sequence of anti-defense homologs identified (more details in the specs)
  source 1..216: mol_type = other DNA
atggacttcggcgaagcactcgacgctcttcgcgccggccagaaggtcagccgcgaaggctggaacggacgcgggatgtggctcgcgctgcaggtgcccgacgaacactcgaagatgcggcgcccctacatctacatgcgcccggtcgacggtgatttcgtcccatgggtcgcatcccagtccgacctgctcgccaacgactggctcgtcgtctga

SEQ ID NO: 911 - DNA, 309 bp, synthetic construct
  misc_feature 1..309: note = NA sequence of anti-defense homologs identified (more details in the specs)
  source 1..309: mol_type = other DNA
atggacttcggccaggcactgagcgcgctgaagagtggcagcaaggtcagccgtagcggctggaacggcaagggcatgtacgtcgtgctccagaagggctatccggatggcatcggcgcgaacgcgaacaccgccgaggccctcggcgtcgacgagggcacggtgctggtgttccgcccgtacctgacgatgcgcaccgtcgacggcgagttcgtgccgtgggtcgcctcgcagaccgacctgctcgccgaggactggctcctggccggcgggatcgtccgacccaccaccgacaaggagaacccgtga

SEQ ID NO: 912 - DNA, 387 bp, synthetic construct
  misc_feature 1..387: note = NA sequence of anti-defense homologs identified (more details in the specs)
  source 1..387: mol_type = other DNA
atggatgcggaagtagtggaacacgcaaaggctgtctctaaatggctaagggaaaacaaaaatccacatgccaccattgaaattacagacgagggcttaaaaatgaaatcggatgaacagtttattccaatgagatcatcggcagttatatcaagatacagcgaagggctgcggtttaaatcaaacaatggagtgttgagcgtgaagattgcgcatttggatttcggagaagcgataaaagcagttaaagagggtaagcaaatagcgcgtaaagggtggaacggtaaaaaccagtttgtttatttgattaaaggtactgatttacaaagaggccttaaatatggatatggagagtatgaaggagagctacaattactgatgtgctag

SEQ ID NO: 913 - DNA, 510 bp, synthetic construct
  misc_feature 1..510: note = NA sequence of anti-defense homologs identified (more details in the specs)
  source 1..510: mol_type = other DNA
atgtggcttggatgtattaataatttatataaaatgaaaacattagatgaaaaatccgctgaatattcagcaaagctatgtaaccaaagtggtaactactcaaaaggagaacttgaaacagcttatgtattgggtgcaaatgagagtagagaattacaatatggtgaacacggtacatttggtcaggctctggagtctgtaaagcaaggaagacttgctactcgaaaaggatggaatgggaaaggtatgttcgtatttatgagacctgctgatgaattgcatgtaggctttgttgctaaagatataaaatctttgccacaaagagtaaaggactacttctatcgggactgcgtggatgaaaaaggaaatccgcttgaattgaaaaaagacgatgttgttaaattcacagcatacctttgcatgaaagctgctgatggtactattgtcaacggttggttagcctctcaaactgatatgttagcagacgattggttgttatttgatttctaa

SEQ ID NO: 914 - DNA, 564 bp, synthetic construct
  misc_feature 1..564: note = NA sequence of anti-defense homologs identified (more details in the specs)
  source 1..564: mol_type = other DNA
atgacttacgaaggaataatgaatgccctcgaagatggaaaaaaagtaagactcccagaatggagaggatactggtttatggacgaagacggcgaagtcttggggctgaccaaggaaggtgacatagttatcccttggatatcggaaaaccatactgctgcacatcgcctggcattacaacaaaggacggactgggaaatagctgaaggtcttgacttcggttgggccatctgcgcactaaaggcaggaaaactggtcactcgaaaaggatggaacggcaaagggatgttcctcttcattaggccggaggatgaattggatgttgattttatagttgagaaagtaaagtctcttcctcaaagtctcaaaaattattatgccaaaagagacccatggatgaatgaggaaacaggcgtgatatcaaagagccaagccttgccaaattcaaaagtaaaattcacctcctacatctgcatgaaagcagccgatggcaccatggtcaatggctggctcgcatcccagactgacatgcttgctgaggactggcagttgtttgattcttaa

SEQ ID NO: 915 - DNA, 633 bp, synthetic construct
  misc_feature 1..633: note = NA sequence of anti-defense homologs identified (more details in the specs)
  source 1..633: mol_type = other DNA
atgccccagtttcgcaaacgacccatcgttatcgaggccgtccaattcgacggtttcgaaaatgaggatgaagatacgccagcccctatgttcaatggcagatttcatgctcctgactggatcctggacgccctcggtaaaaacgagggtgaggaaggcgctatctaccatggtgacgaagacctcatcgaagacctcatcatcgtgacccttgagggcaacctcatcgcgcgcccaggcgactggatcatcaagggcgtgcagggcgagatctacccctgcaagcctgatatcttcgccgcaacttatgacgagggtggccagcaggatgtggggatcggtaagaaccccttgtatcgcggcaatgacatgaccttcggccaggccctcgacgcgctcaaggaaggcctgcgggtcgcccgcgcgggctggaatggcaagggcatgttccttttcctcgtgcccggcagccggttcaaggtcaatcggcctccgcttctcggcatctacgaggaaggaaccgagatcaactatcacgcgcacatctacatgaagactgcgcaggataccgttgttccatggcttgccagccaaacggatgcgcttgccgaagactggaccgtcatcgactaa

SEQ ID NO: 916 - DNA, 420 bp, synthetic construct
  misc_feature 1..420: note = NA sequence of anti-defense homologs identified (more details in the specs)
  source 1..420: mol_type = other DNA
atggcagtaatgattcacagcaaatatgggtacgagccgcctgaatgggtgcaggctgatgctcggctagataagtggtgtaaggataagaagcgtcgtgctaaacagcatggcgcttttagtttggaaaaaaataaggaggaagcaattatgaattttggagaagcacttgaagaattaaaacagggtaactgtgttgcacgtaaaggctggaacggtaaaggaatcttcattaagttgaaaaaaggagaatctttaagcacaccaaacaatcgttttaatgaggttatgactcacgatttcatttatattgacacgactgggctacgcacgaacaatccgaatgcacctatggatcgagttccatggttagctagtcaaactgatatgctagctgatgactgggtcgtagtcgaataa

SEQ ID NO: 917 - DNA, 288 bp, synthetic construct
  misc_feature 1..288: note = NA sequence of anti-defense homologs identified (more details in the specs)
  source 1..288: mol_type = other DNA
gtgaactttggacaagcattggaatcgttgaaaagaggggcaaaagtcgctcgtgaaggttggaatggtaatggcatgttcatctattacgttgagggaacaaaagttaaatcatcccaacttagaggcgctgcgcttgatcacgtcgggtacttgggcgaaggagacgatccagaggtagtaataaacggacacatcgacatgaaatgcgcggatggtagcatcaccgtaggttggaacccaagtcaaacggatatgcaggcagaagattgggaaatggtggaatag

SEQ ID NO: 918 - DNA, 522 bp, synthetic construct
  misc_feature 1..522: note = NA sequence of anti-defense homologs identified (more details in the specs)
  source 1..522: mol_type = other DNA
atgacccagcatattggcgtaaaactgattaacgcctttccgatgacgagacaggcatataacgattttcgtggctggcagcttcctgccggagaaaacggcgaggatgaaggctatctggttgaatatcttgatggcggaaaacctaacaccgatcgctttgatggctacgttagctggagtccaaaagaagtattcgaaaaggcttatcgtccggtatcagggctaagtttcggccttgccattgaagcgctcaagttggggaataaagtttcccgtgctggctggaatggtaagggtatgtggctggcatacgttaaaccgtacactgaggctgttcatactggcagtacgccttgcttttgcagtcgcgtctttgagttgcctgaaggtacgcatggagaatcgaaacgatctccgaaacaacttccgtatatcgccatgaaaacagcggacgataaattagtgccgtggctggctagtcagactgatgttctagcagaagactggcaaatcatttaa

SEQ ID NO: 919 - DNA, 462 bp, synthetic construct
  misc_feature 1..462: note = NA sequence of anti-defense homologs identified (more details in the specs)
  source 1..462: mol_type = other DNA
atgaacttcggtgacgcactcaaggagctgaaagcaggcaagcgcgtgcagcgtgctggctggaacggcaaaggcatgttcgcctatctggtgcctgcggccaagtacccggtgcagaccggggcagccaagactcacttcggcgaaggcgccatggttccctacaacccttatctcgccatcaagaacgtggacgagacagtgagcacctgggttcctagcatcaatgactgcttggccgatgactggcaggttatcggctgcacggtaccgccccaccagcagcgcgtgctggatgaaaagcaggaaaacgacgttcgcatcaccaagctggacgagttcattgatcgcaatgccttgttccgccagttgagcttggacgagcaggcccgcatgcgccgccagctcgatgtgatgcgcgagctgtctgtgatcctgggcgagcgcatctctgctttctaa

SEQ ID NO: 920 - DNA, 543 bp, synthetic construct
  misc_feature 1..543: note = NA sequence of anti-defense homologs identified (more details in the specs)
  source 1..543: mol_type = other DNA
caaacaccaggatttagcctcgcattcgcggggttttttattcccaactccataggtaattttatgacccagcatattggcgtaaaactgattaacgcctttccgatgacgagacaggcatataacgattttcgtggctggcagcttcctgccggagaaaacggcgaggacgaaggctatctggttgaatatctggatggcggaaaacctaacaccgatcgctttgatggctacgttagctggagtccaaaagaagtattcgaaaaggcttatcgtccggtatcagggctaagtttcggccttgccatggaagcgttaaaacagggcaaaagtttgcagcgggcaggatggaatgggaaagaccagtttgtttatctcgtgaaaggggaaaaattagcgtctgcgttgggttatggctttggcgaatatgttggcgagccaactttcaatgacacgcttgtattgaaaaactcacagaaccgccttgctacatgggttccatccattggcgacctgatggctgaagactggcaaatcatttaa

SEQ ID NO: 921 - DNA, 645 bp, synthetic construct
  misc_feature 1..645: note = NA sequence of anti-defense homologs identified (more details in the specs)
  source 1..645: mol_type = other DNA
atgtcccccttcagcccgacccacgtcagtcacaagcaggttgaggcctatccgatcgcggcggccgagttccaggccgacggctcgggcaaggtcggcgtgaaccacccggaggacggctacgtcgtcgtcccggtccctgccggcttccttcgccaccctggcgccgtgaccgagggcgacatgctggtgcggtacgcgccgacggcagaggagccgctcggctacctctcgcactcgccgcgcgcggtgttcgaggcgggctatgcgccgctgatccccgcccagcaccgcaagtcttacgaaggtggcggccggggcctcaccttcgggcaggccctggagcagttgaaagacggcgatgccgtcgcccgtgatggctggaacggcaagggcatgttcctgctgctcgtgccgggttcgcagggcctcaccgttgatgagggccgtccgctggcgaaggccggcgtaccggtcgggacccggttcgattacctgccccacatcgacatgtggaccgcgcagggcgccttcgtcccctggctggcatcgcagtccgacatgctcgccgaggactggtgcgtcgtgcaacgcgagatgccgacggccgaccacgcccacgacgatctcggccgggtcgcctga

SEQ ID NO: 922 - DNA, 480 bp, synthetic construct
  misc_feature 1..480: note = NA sequence of anti-defense homologs identified (more details in the specs)
  source 1..480: mol_type = other DNA
atgacccagcatattggcgtaaaactgattaacgcctttccgatgacgagacaggcatataacgattttcgtggctggcagcttcctgccggagaaaacggcgaggacgaaggctatctggttgaatatctggatggcggaaaacctaacaccgatcgctttgatggctacgttagctggagtccaaaagaagtattcgaaaaggcttatcgtcctgtatcagggctaagtttcggccttgccatggaggcgttaaaacagggcaagagtttgcagcgggcaggatggaatgggaaagaccagtttgtttatctcgttaaaggggaaaaattagcgtctgcgttgggttatggctttggcgaatatgttggcgagccaactttcaatgacacgcttgtattgaaaaactcacagaaccgccttgctacgtgggttccatccattggcgacctgatggctgaagactggcaaatcatttaa

SEQ ID NO: 923 - DNA, 270 bp, synthetic construct
  misc_feature 1..270: note = NA sequence of anti-defense homologs identified (more details in the specs)
  source 1..270: mol_type = other DNA
atgaattttggaaaagcacttgaagaattaaaacagggtaactgtgttgcacgtaaaggctggaacggtaaaggaatcttcattaagttgaaaaaaggggaatctttaagcacaccaaacaatcgttttgatgaggtcatgacgcacgatttcatttatattgatacgactggtttgcacacgaacaatccagatgcacctatggatcgagttccatggttagctagtcaaactgatatgctagctgatgactgggtcgtagtcgaataa

SEQ ID NO: 924 - DNA, 402 bp, synthetic construct
  misc_feature 1..402: note = NA sequence of anti-defense homologs identified (more details in the specs)
  source 1..402: mol_type = other DNA
atgattaacacaaaatatggctacgtcacgccacaagaagcggagatggatggccacttagataaatggatgaagcgtcgtgctaaacagcatggcgcttttagtttggagaaaaataaggagaaagcaattatgaattttggagaagtgcttgaagaattaaaacgaggtaattgtgttgcacgtaaaggttggaacggcaaaggcatcttcattaaattgaaaaagggagaatctttgaacactcccaataatcgttttaatgaggttatgactcacgatttcatttatattgacacgactgggctacgcacgaacaatccgaatgcacctatggatcgagttccatggttagctagtcaaactgatatgctagctgatgactgggtcgtagtcgaataa

SEQ ID NO: 925 - DNA, 519 bp, synthetic construct
  misc_feature 1..519: note = NA sequence of anti-defense homologs identified (more details in the specs)
  source 1..519: mol_type = other DNA
atgaaattaatcactgcatctgttttaacagccctacttacttcatttgttgccacccgaacggtacaagcaacaccgctcaaccgtcaagaatacaatgatttgcgtgggtggcaagtgcctgataatgaaaatcctaacgatgacggctatcttgtcgttaatgcaggtgtgtccgaacgcaatgtggacggctttgatggttatgtgtcgtggttacccaaacttgcgtttgaagagcaatataaaaacgacaatttaacctttgggcaagcggtggagttgttaaaaggcggtaaaaaagtcgctcgtaaaggttggaatggcaagggtatgtatttgttgcttgctaccgacattgattttaagactaaggctaatttgtcagatatgcagaatgaaaatggcgaactgaccgtgccatctatcacgatgaaaacagcagacaataaatttgcagtcggttggcttgccagtcaaactgatatgttggcagaagattgggttgtcgtacagtaa

SEQ ID NO: 926 - DNA, 339 bp, synthetic construct
  misc_feature 1..339: note = NA sequence of anti-defense homologs identified (more details in the specs)
  source 1..339: mol_type = other DNA
atggaagaaatgaaaatagtaagagagttattaagttttgggcaggcaattgaagctttaaagcgaggaggtttaataacccgtgaaggatggaacggaaaaggaatgtttgtgtttcagcaagtacctagtgaagtaccaataactattgttgacaaaatgaaatcattacctcaggcagcaaaagatgtatttaaacttcggtttattctgacaccaaaaataaacactgtaaagtacagtaatcagttagcaatagtttacccagataactctatttatggatgggtagcatctccttcggatattctagcaaatgattggattgcattagcttaa

SEQ ID NO: 927 - DNA, 306 bp, synthetic construct
  misc_feature 1..306: note = NA sequence of anti-defense homologs identified (more details in the specs)
  source 1..306: mol_type = other DNA
atgtatcccttcggccctctagtagggccttttttatttctggagttagaaaatatgcctcataacatgaattttggtgatgcacttcaagcaataaaggatggtcgtgaggtggctcgtgctgggtggaacgggaaaaaccagtttgtgttcatgatcaaggcatccgattatcaaaagacgctagggtttgatcttaaagtgtgcgacggtctcgcgattaaaacatctaaaaacgaaattcaagttggctggcttgcatcacaacaagacatgctagctgatgattggaagataatcgagtaa

SEQ ID NO: 928 - DNA, 255 bp, synthetic construct
  misc_feature 1..255: note = NA sequence of anti-defense homologs identified (more details in the specs)
  source 1..255: mol_type = other DNA
atgaattttggcaaagcgttagaagcagccaaggctggtgcaaagatttatcgtgaaggctggaacggtaaaggtatgtttttgttcgccattcaggaaggtcattggggttttgaaacagacattgatggcgtagatgggtatgagacggtcgggttcatttgcatgaagactgcggacaacaagttggtgccgtggcttgcgtctcaaacggacattttatccgatgactggctggctgagccggtagcataa

SEQ ID NO: 929 - DNA, 489 bp, synthetic construct
  misc_feature 1..489: note = NA sequence of anti-defense homologs identified (more details in the specs)
  source 1..489: mol_type = other DNA
atgaagaagcacatcgggaccaaggtcgtgaacatgcagcccatgacgcgcggcgcgtacaacgcgtttcgcggctggactgttccggcggacgagaacccggaggacgacggctatctcgtcgaatacctcgacggcggcaatccgaacacgcctcactacgctggttacgtcagctggtcgccgaaggcgcaggccgaagccgcatatcgcccgaccgacggcctgacgttcggtcttgcactggaagcactgaagaaagggctgcgccttgctcgtgccggctggaatggtaagggcatgttcgtctatctcgtgccggcggccgcatatccggtgcagaccggcgcagcgaaggcgcacttcggcgagggctccctcgttccgtacaacgcctacctcgggctgaagggcgtcgacgacacggtcagcacgtgggtgccgagcgtgaccgactgcctcgccgaagactggcgcgtcatcgagtaa

SEQ ID NO: 930 - DNA, 537 bp, synthetic construct
  misc_feature 1..537: note = NA sequence of anti-defense homologs identified (more details in the specs)
  source 1..537: mol_type = other DNA
atggaattggaagaaaaagaaagcttgcaaggtttcataggagtgaaaaggatcaaagcacgaccgatgaccaggcgtggatacaacggctatcgtggctggcaacttcctgcggatgaaaatggagatgatgaagggatgcttgtcgagtatgtcgatggcggtaaatccaatcatcccgcacatgagggctatatcagctggtcacctatcgatgttttcaatcgtgcatatcggccatgtgatgcccttacgtttggctttgcaatcgaagcggcaaaggccggagagaagattgcccgaaaaggctggaatggaaagggcatgtttgtcttctaccagaagggctacccggaaggaataccgatcaacaaaaataccgcagaggcaacaagattgccggaaggaaccgtctgcaaattccggccgtatctcatgatgaagacagcacaaaacgacttcgtgccatgggttgcatcgcagaccgacatcttagcggaggactgggagattatcgagcagggagaacagaaatga

SEQ ID NO: 931 - DNA, 537 bp, synthetic construct
  misc_feature 1..537: note = NA sequence of anti-defense homologs identified (more details in the specs)
  source 1..537: mol_type = other DNA
atggaattggaagaaaaagaaagcttgcaaggtttcataggagtgaaaaggatcaaagcgcgatcaatgaccaggcgtggatacaacggctatcgcggctggcaacttcctgcggatgaaaacggagatgatgaaggaatgcttgtcgagtatgtcgatggcggtaaatccaatcatcccgcacatgaaggctatatcagctggtcacctatcgatgttttcaatcatgcttatcggccatgtgatgcccttacgtttggctttgcaatcgaagcggcaaaggccggagagaagattgcccggaaaggctggaatggaaaaggcatgtttgtcttctaccagaagggctacccggaaggaataccgatcaacaaaaacaccgcggaggcaacaagattgccggaaggaaccgtctgcaaatttcggccgtatctcatgatgaagacagcacaaaacgactttgtgccgtgggttgcatcgcaaaccgacatcttagcggaggactgggagattatcgagcagggagaacagaaatga

SEQ ID NO: 932 - DNA, 480 bp, synthetic construct
  misc_feature 1..480: note = NA sequence of anti-defense homologs identified (more details in the specs)
  source 1..480: mol_type = other DNA
atgacccagtatattggcgtaaaactgattaacgcctttccgatgacgagacaggcatataacgattttcgtggctggcagcttcctgccggagaaaacggcgaggacgaaggctatctggttgaatatctggatggcggaaaacctaacaccgatcgctttgatggctacgttagctggagtccaaaagaagtattcgaaaaggcttatcgtccggtatcaggactaagtttcggccttgccatggaagcgttaaaacagggcaaaagtttgcagcgggcaggatggaatgggaaagaccagtttgtttatctcgtgaaaggggaaaaattagcgtctgcgttgggttatggctttggcgaatatgttggcgagccaactttcaatgacacgcttgtattgaaaaactcacagaaccgccttgctacatgggttccatccattggcgacctgatggctgaagactggcaaatcatttaa

SEQ ID NO: 933 - DNA, 480 bp, synthetic construct
  misc_feature 1..480: note = NA sequence of anti-defense homologs identified (more details in the specs)
  source 1..480: mol_type = other DNA
atgacccagcatattggcgtaaaactgattaacgcctttccgatgacgagacaggcatataacgattttcgtggctggcagcttcctgccggagaaaacggcgaggacgaaggctatctggttgaatatctggatggcggaaaacctaacaccgatcgctttgatggctacgttagttggagtccaaaagaagtattcgaaaaggcttatcgtccggtatcaggactaagtttcggccttgccatggaagcgttaaaacagggcaaaagtttgcagcgggcaggatggaatgggaaagaccagtttgtttatctcgtgaaaggggaaaaattagcgtctgcgttgggttatggctttggcgaatatgttggcgagccaactttcaatgacacgcttgtattgaaaaactcacagagccgccttgctacatgggttccatccattggcgacctgatggctgaagactggcaaatcatttaa

SEQ ID NO: 934 - DNA, 255 bp, synthetic construct
  misc_feature 1..255: note = NA sequence of anti-defense homologs identified (more details in the specs)
  source 1..255: mol_type = other DNA
atgaaagaaataatgacatttggcgaagcattggaagcaatgaaagccggaaagaaagttgccagaaccggctggaacggtaaaggaatgtacctgtatcttgctgacggcaaattgctgacgcaggaaatcggtgacggaagttatccgtttacggacagcattgtcatgaaaaccgcggataaccggtactgcatcggctggcttgcaagtcagacagatatgctggcagaggattggcacattgtagagtaa

SEQ ID NO: 935 - DNA, 453 bp, synthetic construct
  misc_feature 1..453: note = NA sequence of anti-defense homologs identified (more details in the specs)
  source 1..453: mol_type = other DNA
atgaaaacattagatgaaaagtctgccgaatatgcagcaagtgtagtatcgtgtaataaagaagcaaaagagtgtgaggggcttatccaaacagcttatattcttggagcgatggaatgtgaattgcttggagaagaaacaggaaccttcgggcaagcacttgaatccctcaaacgggggcatcttgttgctcgtaaaggatggaacggtaaggggatgtttatattcatgcgcccggaagatagtttgtctgctgatatgattgtaaatcaggttaaatcacttcctgaatcatttaaaaagtgggttgccaataatcatggagatttggcgaatgataaaatcaagtttactgcatacttgtgtatgaaagctgctgatggaacagttgttaatggttggcttgcgtcccaaactgatatgcttgcaaatgattgggttatcgttgagtaa

SEQ ID NO: 936 - DNA, 480 bp, synthetic construct
  misc_feature 1..480: note = NA sequence of anti-defense homologs identified (more details in the specs)
  source 1..480: mol_type = other DNA
atgacccagcatattggcgtaaaactgattaacgcctttccgatgacgagacaggcatataacgattttcgtggctggcagcttcctgccggagaaaacggcgaggacgaaggctatctggttgaatatctggatggcggaaaacctaacaccgatcgctttgatggctacgttagctggagtccaaaagaagtattcgaaaaggcttatcgtccggtatcagggctaagtttcggccttgccatggaagcgttaaaacagggcaaaagtttgcagcgggcaggatggaatgggaaagatcagtttgtttatctcgtgaaaggagaaaaattagcgtctgcgttgggttatggctttggcgaatatgttggcgagccaactttcaatgacacgcttgtattgaaaaactcacagaaccgccttgctacatgggctccatccattggcgacctgatggctgaagactggcaaatcatttaa

SEQ ID NO: 937 - DNA, 480 bp, synthetic construct
  misc_feature 1..480: note = NA sequence of anti-defense homologs identified (more details in the specs)
  source 1..480: mol_type = other DNA
atgacccagcatattggcgtaaaactgattaacgcctttccgatgacgagacaggcatataacgattttcgtggctggcagcttcctgccggagaaaacggcgaggacgaaggctatctggttgaatatctggatggcggaaaacctaacaccgatcgctttgatggctacgttagctggagtccaaaagaagtattcgaaagggcttatcgtccggtatcaggactaagtttcggccttgccatggaagcgttaaaacagggcaaaagtttgcagcgggcaggatggaatgggaaagaccagtttgtttatctcgtgaaaggggaaaaattagcgtctgcgttgggttatggctttggcgaatatgttggcgagccaactttcaatgacacgcttgtattgaaaaactcacagaaccgccttgctacatgggttccatccattggcgacctgatggctgaagactggcaaatcatttaa

SEQ ID NO: 938 - DNA, 510 bp, synthetic construct
  misc_feature 1..510: note = NA sequence of anti-defense homologs identified (more details in the specs)
  source 1..510: mol_type = other DNA
atggggattattaatcttgaaggtggttcaatgacccaacatattggcgtgaaactgattaacgcctttccgatgacgagacaggcatataacgattttcgcggctggcagcttcctgccgacgagaacggcgcggacgaaggctatctggttgaatatctggacggcggaaaacctaacaccgatcgctttgatggctacgttagctggagcccgaaagaagtattcgaaaaggcttaccgtccggtatcagggctgagtttcggccttgccattgaagcgctcaagcaggggaagagtttgcagcgggcgggatggaacgggaaagaacaatttgtttatctcgtgaaaggcgaaaaattagcgtcggcactgggttatggctttggcgaatatgttggcgagccaacgttcaatgacatgtttgtgctgagaaattcacagaatgaattgtgcgcttgggtaccgtctacgggcgacctgatggccgaagactggcaaatcgtttaa

SEQ ID NO: 939 - DNA, 453 bp, synthetic construct
  misc_feature 1..453: note = NA sequence of anti-defense homologs identified (more details in the specs)
  source 1..453: mol_type = other DNA
atgaaaacattagatgaaaaggctgcaggatatgcagcgagtgtagtatcatgtaacaaagaaacaaaagaatgtgaggggcttattcaaacagcttatattcttggagcaatggaatgtgaattattgggagaagaaaccggaacgtttggacaggcacttgaatctcttaaacgtggacatcttgttgctcgtaaaggatggaatggtaaggggatgtttatatttatgcgaccagaagatagtctgtcgactaacatgattgtgaatcaggttaaatcacttcccgaatcattcaaaagatgggttgccaacaatcatggagattcggaaactgatagaatcaagtttactgcatacttatgtatgaaagctgccgatggcaccgttgtaaatggttggcttgcatcacagacggatatgcttgctaacgattgggtgatagttgaataa

SEQ ID NO: 940 - DNA, 516 bp, synthetic construct
  misc_feature 1..516: note = NA sequence of anti-defense homologs identified (more details in the specs)
  source 1..516: mol_type = other DNA
atgacatttaaagaagcattaaaagcaatgaaacgtggagcaaaggtgagacttcctggttggttatcttattattggtactgggatgaggaaaaagagacggttatgacgcatagtaagccgttgctcattggatgcgaagaacatgaaactgatattaaagacgagagagttgggagattttttgatgatatgctaagagaggactggatgattgcaaacgaagaaaattgtccgatagtctgtgacaaagcagtattttcatttggtgacgctatcacatatctgaaaaaagggcgcaaggtggcacgtaaaaattggaatggtaaggggatgttcttgtttgtcgcagatgaaatccatttctttacgaaaacagaactgaaaaagaaaaatgatgaaccttacgatatgctcccgtcaattactatgaaaacagcagataataaatgcgttgtcggatgggttccgtctcaaactgatatgcttgctgaagattgggtgtttgcagagtag

SEQ ID NO: 941 - DNA, 261 bp, synthetic construct
  misc_feature 1..261: note = NA sequence of anti-defense homologs identified (more details in the specs)
  source 1..261: mol_type = other DNA
atgaattttggaaaagctattgaagcaatgaaaaaaggtgagaaggtcacacgcaagggctggaatggcaaaggaatgtttttatttcttgcaaaatctactgatatcgaaacggatgcagatttaacagtgtgtgaacatatgcaaggaaatctagtattgccaagtattgtaatgaaaactgctgatgacaagttttgtgttggatggttagcaagccaaaccgacatgctcgcagaagattggatgactatagaataa

SEQ ID NO: 942 - DNA, 519 bp, synthetic construct
  misc_feature 1..519: note = NA sequence of anti-defense homologs identified (more details in the specs)
  source 1..519: mol_type = other DNA
atgatttttaaagaagcgtttgaattaatgaaacagggtgcgaaagtaaaattgcctggatggaatggttactggtgttgggataatgataagcagacgattatgattcattgcggaccaaaggattccgacaaaggacagggagaaattcttgatatccgtgaaacgcagagagtggaatatactttcatgcacacacagagagacgattggatgattgccgatggagagaattgcggtgttctcggcggtcagtcaacatttggctttgatgatgctatccgttatctgaaaagaggacttaaggtggcacgtaaaggatggaatggcaaggggatgttcttgtttgtcgcagatgaaatccatttctttacgaaaacagaactgaaaaagaaaaatgatgaaccttacgatatgctcccgtcaattactatgaaaacagcagataataaatgcgttgtcggatgggttccgtctcaaactgatatgtttgcagaagattggatgtttgtggaatga

SEQ ID NO: 943 - DNA, 480 bp, synthetic construct
  misc_feature 1..480: note = NA sequence of anti-defense homologs identified (more details in the specs)
  source 1..480: mol_type = other DNA
atgacccagcatattggcgtaaaactgattaacgcctttccgatgacgagacaggcatataacgattttcgtggctggcagcttcctgtcggagaaaacggcgaggacgaaggctatctggttgaatatctggatggcggaaaacctaacaccgatcgctttgatggctacgttagctggagtccaaaagaagtattcgaaaaggcttatcgtccggtatcaggactaagtttcggccttgccatggaagcgttaaaacagggcaaaagtttgcagcgggcaggatggaatgggaaagaccagtttgtttatctcgtgaaaggggaaaaattagcgtctgcgttgggttatggctttggcgaatatgttggcgagccaactttcaatgacacgcttgtattgaaaaactcacagaacctccttgctacatgggttccatccattggcgacctgatggctgaagactggcaaatcatttaa

SEQ ID NO: 944 - DNA, 453 bp, synthetic construct
  misc_feature 1..453: note = NA sequence of anti-defense homologs identified (more details in the specs)
  source 1..453: mol_type = other DNA
atgaaaacattagatgaaaggtctgccgaatatgcagcaaacgtagtatcgtgtaataaagaagcaaaagagtgtgaggggcttatccaaacagcttacattttaggcgcaatggaaggcgaattgttgggagaagaaacgggaacatttgggcaagcacttgaatccctcaaacgggggcatcttgttgctcgtaaaggatggaacggtaaggggatgtttatatttatgcgcccggaagatagtttgtctactgatatgattgtaaatcaggttaaatcacttcctgaatcattcaaaaaatgggttgccgacaatcatggagattcggaaactgataaaatcaagtttaccgcatacttatgtatgaaagctgctgatggaactgttgttaatggttggcttgcctcccaaactgatatgcttgcaaatgattgggttatagtagagtaa

SEQ ID NO: 945 - DNA, 384 bp, synthetic construct
  misc_feature 1..384: note = NA sequence of anti-defense homologs identified (more details in the specs)
  source 1..384: mol_type = other DNA
gtggaatttactttaacaataacaagacctaatgctgtagaggtaagcgtaaataaaatgaaaactaaaaacatgacatttggagaagctttagaggctatcaaaaaaggggagttggtttgtcgtgaaggatggaatggaaaaggcatgtttatctttcagcgtcctgaagactatttgtctacagacatggtcgtgaataaggttaaatccttacctgatgcagtaaagaaatgggttgctaataaatatggtgactcggaaacggacaagatcaagttcacggcttatttgtgtatgaaagccgctgatgatactatcgtaaatggctggttagcatctcaaacggatatgctagctacggattggatgatcgttcgatag

SEQ ID NO: 946 - DNA, 516 bp, synthetic construct
  misc_feature 1..516: note = NA sequence of anti-defense homologs identified (more details in the specs)
  source 1..516: mol_type = other DNA
atgacatttaaagaagcattaaaagcaatgaaacgtggagcaaaggtgagacttcctggttggttatcttattattggtactgggatgaggaaaaagagacggttatgacgcatagtaagccgttgctcattggagacgaagaatatgaaactgatattaaagacgagagagtcgagagagtttttgatgatatgctaagagaggactggatgattgcaaacgaagaaaattgtccgatactctgtgacaaagcagtattttcatttggtgacgctatcacatatctgaaaaaagggcgtaaagtggcacgtaaaggttggaatggtaaggggatgttcttgtttgtcgcagatgaaatccatttctttacgaaaacagaattgaaaaagaaaaatgatgaaccttacgatatgctcccgtcaattgctataaaaacagcgaataataaatgcattgttggatgggttccgtctcaaactgatatgcttgcagaagattgggtatttgcggagtag

SEQ ID NO: 947 - DNA, 480 bp, synthetic construct
  misc_feature 1..480: note = NA sequence of anti-defense homologs identified (more details in the specs)
  source 1..480: mol_type = other DNA
atgacccagcatattggcgtaaagctgattaacgcctttccgatgacgagacaggcatataacgattttcgtggctggcagcttcctgccggagaaaacggcgaggacgaaggctatctggttgaatatctggatggcggaaaacctaacaccgatcgctttgatggctacgttagctggagtccaaaagaagtattcgaaaaggcttatcgtccggtatcagggctaagtttcggccttgccatggaagcgttaaaacagggcaaaagtttgcagcgggcaggatggaatgggaaagaccagtttgtttatctcgtgaaaggggaaaaattagcgtctgcgttgggttatggctttggcgaatatgttggcgagccaactttcaatgacacgcttgtattgaaaaactcacagaaccgccttgctacatgggttccatccattggcgacctgatggctgaagactggcaaatcatttaa

SEQ ID NO: 948 - DNA, 255 bp, synthetic construct
  misc_feature 1..255: note = NA sequence of anti-defense homologs identified (more details in the specs)
  source 1..255: mol_type = other DNA
atgaaagaaataatgacatttggcgaagcattggaagcaatgaaagccggaaagaaagttgccagaaccggctggaacggtaaaggaatgtacctgtatcttgctgacggcaaattgctgacgcaggaaatcggtgacggaagttatccgtttacggacagcattgtcatgaaaaccgcggataaccggtactgcatcggctggctggctagtcagaccgatatgctggcgggagattggtgcatcgtagagtaa

SEQ ID NO: 949 - DNA, 327 bp, synthetic construct
  misc_feature 1..327: note = NA sequence of anti-defense homologs identified (more details in the specs)
  source 1..327: mol_type = other DNA
atggtaactaaaaacatgacatttggagaagctttagaggctatcaaaaaaggagagttggtttgtcgtgaaggatggaatgggaaaggcatgtttatttttcagcgtcctgaagattgtctgtctacggacatggtcgtgaataaggttaaatccctacctgatgctgtcaagaaatgggttgctagtaaatatggagactcggaaacggacaagatcaagttcacggcttatttgtgtatgaaagccgctgatgatactatcgtaaatggctggttggcatctcaaacggatatgctagctacggattggatgatcgttcgatag

SEQ ID NO: 950 - DNA, 519 bp, synthetic construct
  misc_feature 1..519: note = NA sequence of anti-defense homologs identified (more details in the specs)
  source 1..519: mol_type = other DNA
atgatttttaaagaagcgtttgaattaatgaaacagggtgcgaaagtaaaattgcctggatggaatggttactggtgttgggatgacgaaaaacagacgattatgattcattgcagaccaaaggattccgacaaaggacagggagaaattcttgatatccgtgaaacgcagagagtagaatatactttcatgcacacgcagagagatgactggatgattgctaatgaagagaattgcggtgtcctcggtggtcagtcaacatttggatttggagatgctatccgttatctaaaaagaggacttaaggtgacacgtaaaggatggaatggcaaggggatgttcttgtttgtcgcagatgaaatccatttctttacgaaaacagaactaaaaaagaaaaatgatgaaccttacgatatgctcccgtcaattactatgaaaacagcagataataaatgcgttgtcggatgggttccgtctcagacagatatgcttgcagaagattggatgtttgtggaatga

SEQ ID NO: 951 - DNA, 480 bp, synthetic construct
  misc_feature 1..480: note = NA sequence of anti-defense homologs identified (more details in the specs)
  source 1..480: mol_type = other DNA
atgacccagcatattggcgtaaaactgattaacgcctttccgatgacgagacaggcatataacgattttcgtggctggcagcttcctgccggagaaaacggcgaggacgaaggctatctggttgaatatctggatggcggaaaacctaacaccgatcgctttgatgactacgttagctggagtccaaaagaagtattcgaaaaggcttatcgtccggtatcaggactaagtttcggccttgccatggaagcgttaaaacagggcaaaagtttgcagcgggcaggatggaatgggaaagaccagtttgtttatctcgtgaaaggggaaaaattagcgtctgcgttgggttatggctttggcgaatatgttggcgagccaactttcaatgacacgcttgtattgaaaaactcacagaaccgccttgctacatgggttccatccattggcgacctgatggctgaagactggcaaatcatttaa

SEQ ID NO: 952 - DNA, 282 bp, synthetic construct
  misc_feature 1..282: note = NA sequence of anti-defense homologs identified (more details in the specs)
  source 1..282: mol_type = other DNA
atgaattttggaaaagcaattgaagcccttaaacaaggcaaaaaagtagcccgcaaaggttggaacggaaaaaatatgttcctttggctcaaaccagctgccattgtcaaggctgaatggtgtaaggatccgatgcttaaagctatcgccgagggtaacggcggtgaaattccggctctcggcactatctgtatgctcaccgctcaaaaagaaatcctttcggggtggttagcctcccaaagtgatatgctttcggaagattgggaaataatcgataactaa

SEQ ID NO: 953 - DNA, 327 bp, synthetic construct
  misc_feature 1..327: note = NA sequence of anti-defense homologs identified (more details in the specs)
  source 1..327: mol_type = other DNA
atggcaactaaaaacatgacatttggagaagctttagaggctatcaaaaaaggagagttggtttgtcgtgaaggatggaatgggaaaggcatgtttatttttcagcgtcctgaagattgtctgtctacggacatggtcgtgaataaggttaaatccctacctgatgctgtcaagaaatgggttgctagtaaatatggagactcggaaacggacaagatcaagttcacggcttatttgtgtatgaaagccgctgatgatactatcgtaaatggctggttggcatctcaaacggatatgctagctacggattggatgatcgttcgatag

SEQ ID NO: 954 - DNA, 327 bp, synthetic construct
  misc_feature 1..327: note = NA sequence of anti-defense homologs identified (more details in the specs)
  source 1..327: mol_type = other DNA
atggtaactaaaaacatgacatttggagaagctttagaggctatcaaaaaaggagagttggtttgtcgtgaaggatggaatgggaaaggcatgtttatttttcagcgtcctgaagattgtctgtctacggatatggtcgtgaataaggttaaatccctacctgatgctgtcaagaaatgggttgctagtaaatatggagactcggaaacggacaagatcaagttcacggcttatttgtgtatgaaagccgctgatgatactatcgtaaatggctggttggcatctcaaacggatatgctagctacggattggatgatcgttcgatag

SEQ ID NO: 955 - DNA, 489 bp, synthetic construct
  misc_feature 1..489: note = NA sequence of anti-defense homologs identified (more details in the specs)
  source 1..489: mol_type = other DNA
atgaattttggtcaagcgttagaattattgaaaaaaggaaagaaagtagcacgtcgagggtggaatggaaaagggatgtttttatattatgttccagcaaattcatatccttcatgtacagaaattgctaaagaggagtttggggcgactgttgaatatggggcttatattgcgatgaaaacagtgcaaggaaatgtggttccttggttagcgagtcaaactgatgtattagcgaatgattggatgtttgagaaagaagaaagacagtttgattgttatggaattgtttatcttgagaaaaaatgggtagatactcttagtattggagatatttttaatggttatcaacctcaaactgaaattgaacgcttatgtttatcgctcatggaagagttgaagaacacagaacacccataccacagcattttaattacagaagattcatttaaagttttagaaacaagacaatgcggaatgagaacagaatag

SEQ ID NO: 956 - DNA, 501 bp, synthetic construct
  misc_feature 1..501: note = NA sequence of anti-defense homologs identified (more details in the specs)
  source 1..501: mol_type = other DNA
atgaaattttcagaagcatttaaactcatgaagcagggggctaaagtaaaacttccgggatggggtggattttggtattgggatgcagagaaagaaaccatcatgatacagtgcagacctcaggacagtgatactcagggcgatttacttgacatcagagaaacccaaagagttgaatataccactatgaatatgcagtctaacgaatggattattgcagacagaacaaactgcccgatactcggcggtgaagcaacattttccttcggagaagcgattaagtacctgaaaaaaggtatgaaagtagcgagaaaaggatggaatggtaaaggaatgtacttatttcttgcagatggagaagatttgacatcttgtctttcctccggggattttgagtgtacaagttctgtgtgtatgaaaacagcgcagaataacatttgcgtgggatggttagcgtcacaggctgatatgcttgcagaagattgggtatttgcaaaataa

SEQ ID NO: 957 - DNA, 516 bp, synthetic construct
  misc_feature 1..516: note = NA sequence of anti-defense homologs identified (more details in the specs)
  source 1..516: mol_type = other DNA
atgaattttaagtcagcgttcagagcaatgagattaggagcaaaagttaagttgcctaaatggagaggatattggtactgggattctacaaagaaaactatcatgatggtagaaaaaacaaaagacggaaaagaaagccaacatatagacataagagcaacactaaatgtgaaacctatattgatgcacatgcaatcagaatattggttcattgcagatggaacgtatgtcgatatgccggattttgatttcacagacggctcctttgaaaatgctctttggtggataaaaatgggtgttaagtgtagccgcaaaggttggaaagcaaacaaagaatatgtgtttgcggcaagcaatgtttcatttaacacagaagtaggttcaatgttttcaaaagaattaaatagtgaagtagatgcacctatactcgtgctgaaaacagctgatgaatttatagttggttggacaccaacacaggaagatatgtttgcagaagattgggaacgcgtatattaa

SEQ ID NO: 958 - DNA, 516 bp, synthetic construct
  misc_feature 1..516: note = NA sequence of anti-defense homologs identified (more details in the specs)
  source 1..516: mol_type = other DNA
atgacatttaaagaagcattaaaagcaatgaaacgtggagcaaaggtgagacttcctggttggttagcttattattggtactgggatgaggaaaaagagacggttatgacgcatagtaagccgttgctcattggatgcgaagaacatgaaactgatattaaagacgagagagttgggagattttttgatgatatgctaagagaggactggatgattgcaaacgaagaaaattgtccgatagtctgtgacaaagcagtattttcatttggtgacgctatcacatatctgaaaaaagggcgcaaggtggcacgtaaaaattggaatggtaaggggatgttcttgcttgtcgcagatgaaatccatttctttacgaaaacagaactgaaaaagaaaaatgatgaaccttacgatatgctcccgtcaattactatgaaaacagcagataataaatgcgttgtcggatgggttccgtctcaaactgatatgcttgctgaagattgggtgtttgcagagtag

SEQ ID NO: 959 - DNA, 525 bp, synthetic construct
  misc_feature 1..525: note = NA sequence of anti-defense homologs identified (more details in the specs)
  source 1..525: mol_type = other DNA
atgacatttaaagaagcactaaaagcaatgaaacgtggagcaaaggtgagacttcctggttggttagcttattattggtactgggatgaggaaaaagagacggttatgacgcatagtaagccgttgctcactggaagcgaagaaaatgaaactgatattaaagacgagagagtcggaagagtttttgatgatatgttaagagaggactggatgattgcaaacgaagaaaattgtccgatactctgtgacaaagcagtattttcatttggtgacgctatcgcatatctgaaaaaagggcgcaaggtgtcacgtaaaggctggaagggtaaggggatgttcttgtttgtcgcagatgaaatccatttctttacgaaaacagaactgaaaaagaaaaatgatgaaccttacgatatgctcccgtcaattactatgaaaacagctgataataaatgcgttgttggatgggttccaacgcaggcagatatgcttgctgaagattgggtgtttgcagagcaggaggattaa

SEQ ID NO: 960 - DNA, 264 bp, synthetic construct
  misc_feature 1..264: note = NA sequence of anti-defense homologs identified (more details in the specs)
  source 1..264: mol_type = other DNA
atgaattttagctttggtgatgcggtcaaagaaatggaaagaggcagaaaagttgctcgcaatggatggaatggcaaaggaatgtttctgtttcttattgcgggcgattgctggaacttcgacaccgacattgagggagtggaagatgttggtggcattaaaacgctgccatttatctgcatgaaaacagctgacaataaacttgttccgtggctcgccagtcaaaccgatgtcatagccagtgactgggtgataatcgagtaa

SEQ ID NO: 961 - DNA, 519 bp, synthetic construct
  misc_feature 1..519: note = NA sequence of anti-defense homologs identified (more details in the specs)
  source 1..519: mol_type = other DNA
atgatttttaaagaagcgtttgaattaatgaaacagggtgcgaaagtaaaattgcctggatggaatggttactggtgttgggataacgacaagcagacgattatgattcattgtagaccgaaagattctgacaaaggacatggggatgttcttgatatccgtgaaacgcagagagtagaatatactttcatgcacacgcagagagatgactggatgattgctaatgaagagaattgcggtgtcctcggcggtcggtcaacatttggatttggtgatgctatccgttatctgaagagagggcttaaagttgctcgtaaaggttggaatgacaaggggatgttcttgtttgtcgcagatgaaatccatttctttacaaaaacagaactgaaaaagaaaaatgatgaaccttacgatatgctcccgtcaattactatgaaaacagcagataataaatgcgttgtcggatgggttccgtctcagacagatatgcttgcagaagattggatgtttgtggaatga

SEQ ID NO: 962 - DNA, 519 bp, synthetic construct
  misc_feature 1..519: note = NA sequence of anti-defense homologs identified (more details in the specs)
  source 1..519: mol_type = other DNA
atggtttttaaagaagcgtttgaattaatgaaacagggtgcgaaagtaaaattgccgggatggaacggctactggtgttgggatggcgaaaaacagacgattatgattcattgtagaccgaaagattctgataaaggacagggagatgttcttgatatccgtgaaacgcagagagtggaatatactttcatgcacacacagagagatgattggatgattgctgatgaagagaattgcggtgttcttggcggtcggtcaacatttggatttggtgatgctatccgttatctgaagagagggcttaaagttgctcgtaaaggttggaatgacaaggggatgttcttgtttgtcgcagatgaaatccatttctttacaaaaacagaactaaaaaagaaaaatgatgaaccttacgatatgctcccgtcaattactatgaaaacagcagataataaatgcgttgtcggatgggttccgtctcagacagatatgcttgcagaagattggatgtttgtggaatag

SEQ ID NO: 963 - DNA, 516 bp, synthetic construct
  misc_feature 1..516: note = NA sequence of anti-defense homologs identified (more details in the specs)
  source 1..516: mol_type = other DNA
atgacatttaaagaagcactaaaagcaatgaaacgtggagcaaaggtgagacttcctggttggttagcttattattggtactgggatgaggaaaaagagacggttatgacgcatagtaagccgttgctcactggaagcgaagaaaatgaaactgatattaaagacgagagagtcggaagagtttttgatgatatgttaagagaggactggatgattgcaaacgaagaaaattgtccgatactctgtgacaaagcagtattttcatttggtgacgctatcgcatatctgaaaaaagggcgcaaggtgtcacgtaaaggctggaagggtaaggggatgttcttgtttatcgcagatgaaatccatttctttacgaaaacagaactgaaaaaggaaaatgatgaaccttacgatatgctcccgtcaattactatgaaaacagctgataataaatgcgttgttggatgggttccaacgcaggcagatatgcttgctgaagattgggtgtttgcagagtag

SEQ ID NO: 964 - DNA, 327 bp, synthetic construct
  misc_feature 1..327: note = NA sequence of anti-defense homologs identified (more details in the specs)
  source 1..327: mol_type = other DNA
atggtaactaaaaacatgacatttggagaagctttagaggctatcaaaaaaggagagttggtttgtcgtgaaggatggaatgggaaaggcatgtttatttttcagcgtcctgaagattgtctgtctacggatatggtcgtgaataaggttaaatccttacctgatgcagtaaagaaatgggttgctaataattatggtgactcggaaacggacaagatcaagttcacggcttatttgtgtatgaaagccgctgatgatactatcgtaaatggctggttggcatctcaaacggatatgctagctacggattggatgatcgttcgatag

SEQ ID NO: 965 - DNA, 519 bp, synthetic construct
  misc_feature 1..519: note = NA sequence of anti-defense homologs identified (more details in the specs)
  source 1..519: mol_type = other DNA
atgatttttaaagaagcgtttgaattaatgaaacagggtgcaaaagtaaaacttcctggatggaacggttactggtgttgggatggtgaaaaagagacgattatgattcattgcagaccaaaggattccgacaaaggacagggagaagttcttgatatccgtgaaacgcagagagtggaatatactttcatgcacacacagagagatgattggatgattgctgatgaagagaattgcggtgttcttggcggtcagtcaacatttggatttggtgatgctatccgttatctgaaaagaggacttaaagtagctcgtaaaggttggaatggtaaagagatgttcttgtttgtcgcagatgaaatccatttctttacgaaaacagaactgaaaaagaaaaatgatgaaccttacgatatgctcccgtcaattactatgaaaacagcagataataaatgcgttgtcggatgggttccgtctcaaactgatatgtttgcagaagattggatgtttgtggaatga

SEQ ID NO: 966 - DNA, 255 bp, synthetic construct
  misc_feature 1..255: note = NA sequence of anti-defense homologs identified (more details in the specs)
  source 1..255: mol_type = other DNA
atgacatttgataatatattagcagatttaaaattaggtagaaaagtaatgagaaagggctggaacggtaagggaatgtatatttattatgtaccagctcagagctatccagccgtaacagaaatagctaaaaaggagtttgggactatggtaccttatggggcttatatagctatgaaaacggctcagggaaacgtggtaccatggttagcaagtcaaacagatattttagctgaggactgggtactgatttaa

SEQ ID NO: 967 - DNA, 834 bp, synthetic construct
  misc_feature 1..834: note = NA sequence of anti-defense homologs identified (more details in the specs)
  source 1..834: mol_type = other DNA
atgtttgacctcgaaagccttaaagacaataacaccatcttctgggtgttccattggccgtctctcagggaagctgcatctgaatgcggatgggccttggcgattcacggctcggttgtacacgaccttgaccttatggcaatgccctggagggaggaccacgcaacggcagacaacctcgcatctgttctttccagcataatcaacagcaatgtcgaggaatcaaggcgttcgattttcaagtacgttgacgagaaacctaatggccgtgtggtctataccataatcggtggaggaacgtatatcgaccttaatgtcattgacagcacctggccgcacatcaaggcagagcagattgttgaagcggcaaagaaccacgaaaatcagaaaggcttcggacgtttggtacattctccagtttctcgtggagtcagctcggcctatggaataggatttcttgaaggtgcagagtgggttatcgactccattgaacagatagttaacctgggtcgcagcaacgacctgatacaatcaaaaacagttatgaataaaaatcttactttcggacaggccatcgaagctctgaagcagggcaagaaggtggcacgtgaaggctggaatggcaaggggatgttcctctggctcaaaccggccacaaccatcaaatctgagtggtgcaaagacccgatccttaagtccattgtggacgcaaacggcggcgaaacggaagccctgggaaccatctgtatgaagacggctgacggaaaggttctcaccggttggcttgcttcccagaccgatatgctcctcgaagactggaccgtggtcgaatag

SEQ ID NO: 968 - DNA, 300 bp, synthetic construct
  misc_feature 1..300: note = NA sequence of anti-defense homologs identified (more details in the specs)
  source 1..300: mol_type = other DNA
atggataagaatttgatggatgctctttacgttaaacatgatggcaagattggcgttttaagctcagatgagcgcaaggtggtatcacaggttatcggcacggatttgacgatagtgtacgacaagaaagagggtaatacgtaccttttgataccattgacccgaaaccacaagttcgagtgtaagggtaattacattatcgtggatggcaagcggttcgattcggacatctttttccgcaaggatgcttgtcaatggattcagatgcaatctaatgaaatgctatcaatggtagcgtaa

SEQ ID NO: 969 - DNA, 453 bp, synthetic construct
  misc_feature 1..453: note = NA sequence of anti-defense homologs identified (more details in the specs)
  source 1..453: mol_type = other DNA
atgaaaacattagatgaaaggtctgccgaatatgcagcaaacgtagtatcgtgtaataaagaagcaaaagagtgtgaggggcttattcaaacagcttacattttaggcgcaatggaaggcgaattgttgggagaagaaacgggaacctttgggcaggcacttgaatccctcaaacgggggcatcttgttgctcgtaaaggatggaacggtaaggggatgtttatatttatgcgcccggaagatagtttgtctactgatatgattgtaaatcaggttaaatcacttcctgaatcattcaaaaaatgggttgccgacaatcatggagattcggaaactgataaaatcaagtttaccgcatacttatgtatgaaagctgctgatggaactgttgttaatggttggcttgcctcccaaactgatatgcttgcaaatgattgggttatagtagagtaa

SEQ ID NO: 970 - DNA, 312 bp, synthetic construct
  misc_feature 1..312: note = NA sequence of anti-defense homologs identified (more details in the specs)
  source 1..312: mol_type = other DNA
atgaaatttggagaagctttagaggcagtaaaagaaggtgagttaattgctcgttcaggatggaatggtaaagatatgttcgtattccagcgaccggaagattggttgtctactgatatgatagttaataaagtaaagtcattgccagattcgtttaaaaaatacgtaaacgattattatgacgtaactgaaaccaacatgattaaattttgcgcttatctgtgcatgaaagatgctaacgataatatcgtaaatggatggttagcttcgcaatcagatatgttggctgatgattggatggtagttggttaa

SEQ ID NO: 971 - DNA, 312 bp, synthetic construct
  misc_feature 1..312: note = NA sequence of anti-defense homologs identified (more details in the specs)
  source 1..312: mol_type = other DNA
atgaaatttggagaagctttagaagaagtaaaaaaaggtgcgttgattgcacgtgccggatggaatggtaaaggtatgttcgtattccagcgccaggaagattggttgtctactgatatgatagttaataaagtaaagtcattgccggattcgtttaaaaaatacgtaaacgattattatgacgtaactgaaaccaacatgattaaattttgcgcttatctgtgcatgaaagatgctaacaataatatcgtaaacggatggttggcttcgcaatcagatatgttggctgatgactggatggtggttggttaa

SEQ ID NO: 972 - DNA, 312 bp, synthetic construct
  misc_feature 1..312: note = NA sequence of anti-defense homologs identified (more details in the specs)
  source 1..312: mol_type = other DNA
atgaaatttggagaagctttagaagaagtaaaaaaaggtgcgttgattgcacgtgccggatggaatggtaaaggtatgttcgtattccagcgcccggaagattggttgtctactgatatgatagttaataaagtaaagtcattgccggattcgtttaaaaaatacgtaaacgattattatgacgtaactgaaaccaacatgattaaattttgcgcttatctgtgcatgaaagatgctaacgataatatcgtaaacggatggttggcttcgcaatcagatatgttggctgatgactggatggtggttggttaa

SEQ ID NO: 973 - DNA, 312 bp, synthetic construct
  misc_feature 1..312: note = NA sequence of anti-defense homologs identified (more details in the specs)
  source 1..312: mol_type = other DNA
atgaaatttggagaagctttagaagaagtaaaaaaaggtgcgttgattgcacgtgccggatggaatggtaaaggtatgttcgtattccagcgcccggaagattggttgtctactgatattatagttaataaagtaaagtcattgccggattcgtttaaaaaatacgtaaacgattattatgacgtaactgaaaccaacatgattaaattttgtgcttatctgtgcatgaaagatgctaacgataatatcgtaaacggatggttagcttcgcaatcagatatgttggctgatgactggatggtggttggttaa

SEQ ID NO: 974 - DNA, 147 bp, synthetic construct
  misc_feature 1..147: note = NA sequence of anti-defense homologs identified (more details in the specs)
  source 1..147: mol_type = other DNA
atgaaatttggagaagctttagaggcagtaaaagaaggtaagttaattgctcgttcaggatggaatggtaaaggtatgtttgtattccagcgcccggaagattggttgtctactgatataatcccaaatagtattaaactaatataa

SEQ ID NO: 975 - DNA, 312 bp, synthetic construct
  misc_feature 1..312: note = NA sequence of anti-defense homologs identified (more details in the specs)
  source 1..312: mol_type = other DNA
atgaaatttggagaagctttagaggcagtaaaagaaggtaagttaattgctcgttcaggatggaatggtaaaggaatgttcgtattccagcgaccggaagattggttgtctactgatatgatagttaataaagtaaagtcattgccggattcgtttaaaaaatacgtaaacgattattatgacatagatgaaaccaacatgattaaattttgttcttatctgtgcatgaaagatgctaacgataatattgtaaatggatggttagcttctcaatcagatatgttggctgatgattggatggtagttggttaa

SEQ ID NO: 976 - DNA, 147 bp, synthetic construct
  misc_feature 1..147: note = NA sequence of anti-defense homologs identified (more details in the specs)
  source 1..147: mol_type = other DNA
atgaaatttggagaagctttagaagcagtaaaagaaggcaagttaattgctcgttcaggatggaatggtaaaggtatgttcgtattccagcgcccggaagattggttgtctactgatataatcccaaatagtattaaactaatataa

SEQ ID NO: 977 - DNA, 312 bp, synthetic construct
  misc_feature 1..312: note = NA sequence of anti-defense homologs identified (more details in the specs)
  source 1..312: mol_type = other DNA
atgaaatttggagaagctttagaagaagtaaaaaaaggtgcgttgattgcacgtgccggatggaatggaaaaggtatgttcgtattccagcgcccggaagattggttgtctactgatatgatagttaataaagtaaagtcattgccagattcgtttaaaaaatacgtaaacgattattatgacgtaactgaaaccaacatgattaaattttgcgcttatctgtgcatgaaagatgctaacgataatatcgtaaacggatggttagcttcgcaatcagatatgttggctgatgactggatggtggttggttaa

SEQ ID NO: 978 - DNA, 312 bp, synthetic construct
  misc_feature 1..312: note = NA sequence of anti-defense homologs identified (more details in the specs)
  source 1..312: mol_type = other DNA
atgaaatttggagaagctttagaggcagtaaaagaaggtaagttaattgcacgttcaggatggaacggtaagggaatgtttgtctttcagcgcccggaagattggttgtctactgatacgatagttaatagagtaaagtcattaccggattcgtttaaaaagtacgtaaaagattattatgacatagatgaaaccaacatgattaaattctgttcttatctgtgcatgaaagatgctaacgataatattgtaaatggatggttagcttcgcaatcagatatgttggctgatgattggatggtagttggttaa

SEQ ID NO: 979 - DNA, 312 bp, synthetic construct
  misc_feature 1..312: note = NA sequence of anti-defense homologs identified (more details in the specs)
  source 1..312: mol_type = other DNA
atgaaatttggagaagctttagaggcagtaaaagaaggtaagttaattgctcgttcaggatggaatggtaaaggtatgttcgtattccagcgcccggaagattggttgtctactgatatgatagttaataaagtaaagtcattgccggattcgtttaaaaaatacgtaaacgattattatgacgtaactgaaaccaacatgattaaattttgcgcttatctgtgcatgaaagatgctaacgataatatcgtaaatggatggttggcttcgcaatcagatatgttggctgatgactggatggtggttggttaa

SEQ ID NO: 980 - DNA, 312 bp, synthetic construct
  misc_feature 1..312: note = NA sequence of anti-defense homologs identified (more details in the specs)
  source 1..312: mol_type = other DNA
atgaaatttggagaagctttagaagaagtaaaaaaaggtgcgttgattgcacgtgccggatggaatggtaaaggtatgtttgtattccagcgcccggaagattggttgtctactgatatgatagttaataaagtaaagtcattgccggattcgtttaaaaaatacgtaaacgattattatgacgtaactgaaaccaacatgattaaattttgcgcttatctgtgcatgaaagatgctaacgataatatcgtaaacggatggttagcttcgcaatcagatatgttggctgatgactggatggttgttggttaa

SEQ ID NO: 981 - DNA, 312 bp, synthetic construct
  misc_feature 1..312: note = NA sequence of anti-defense homologs identified (more details in the specs)
  source 1..312: mol_type = other DNA
atgaaatttggagaagctttagaagaagtaaaaaaaggtgcgttgattgcacgtgccggatggaatggtaaaggtatgttcgtattccagcgacctggagatatgttgtctacagatatgatagttaataaagtaaagtcattgccagattcgtttaaaaaatatataaacgattattatgacataaccgaaaccaatatgattaaattctgtgcttatctatgcatgaaagatgctaacgatgatattgtaaatggatggttagcttcgcaatcagatatgttggctgacgactggatggtaattggttaa

SEQ ID NO: 982 - DNA, 312 bp, synthetic construct
  misc_feature 1..312: note = NA sequence of anti-defense homologs identified (more details in the specs)
  source 1..312: mol_type = other DNA
atgaaatttggagaagctttagaggcagtaaaagaaggtaagttaattgcacgttcaggatggaacggtaagggaatgtttgtctttcagcgcccggaagattggttgtctactgatacgatagttaataaagtaaagtcattgccggattcgtttaaaaagtacgtaaaagattattatgacatagatgaaaccaacatgattaaattctgttcttatctgtgcatgaaagatgctaacgataatattgtaaatggatggttagcttctcaatcagatatgttggctgatgattggatggtagttggttaa

SEQ ID NO: 983 - DNA, 312 bp, synthetic construct
  misc_feature 1..312: note = NA sequence of anti-defense homologs identified (more details in the specs)
  source 1..312: mol_type = other DNA
atgaaatttggagaagctttagaagaagtaaaaaaaggtgcgttgattgcacgtgccggatggaatggtaaaggtatgttcgtattccagcgccaggaagattggttgtctactgatatgatagttaataaagtaaagtcattgccggattcgtttaaaaaatacgtaaacgattattatgacgtaactgaaaccaacatgattaaattttgcgcttatctgtgcatgaaagatgctaacgataatatcgtaaacggatggttagcttcgcaatcagatatgttggctgatgactggatggtggttggttaa

SEQ ID NO: 984 - DNA, 312 bp, synthetic construct
  misc_feature 1..312: note = NA sequence of anti-defense homologs identified (more details in the specs)
  source 1..312: mol_type = other DNA
atgaaatttggagaagctttagaagaagtaaaaaaaggtgcgttgattgcacgtgccggatggaatggtaaaggtatgttcgtattccagcgcccggaagattggttgtccactgatatgatagttaataaagtaaagtcattgccggattcgttaaaaaaatacgtaaacgattattatgacgtaactgaaaccaacatgattaaattttgcgcttatctgtgcatgaaagatgctaacgataatatcgtaaacggatggttagcttcgcaatcagatatgttggctgatgattggatggttgttggttaa

SEQ ID NO: 985 - DNA, 312 bp, synthetic construct
  misc_feature 1..312: note = NA sequence of anti-defense homologs identified (more details in the specs)
  source 1..312: mol_type = other DNA
atgaaatttggagaagctttagaggcagtaaaagaaggtaagttaattgctcgttcaggatggaatggtaaaggtatgttcgtattccagcgaccggaagattggttgtctactgatatgatagttaataaagtaaagtcattgccggattcgtttaaaaaatacgtaaacgattattatgacataacagaaaccaacatgattaaattttgttcttatctgtgcatgaaagatgctaacgataatattgtaaatggatggttagcttcgcaatcagatatgttggctgatgactggatggtagttggttaa

SEQ ID NO: 986 - DNA, 312 bp, synthetic construct
  misc_feature 1..312: note = NA sequence of anti-defense homologs identified (more details in the specs)
  source 1..312: mol_type = other DNA
atgaaatttggagaagctttagaggcagtaaaagaaggtaagttaattgctcgttcaggatggaatggtaaaggtatgttcgtattccagcgaccggaagattggttgtctactgatatgatagttaataaagtaaagtcattgccggattcgtttaaaaaatacgtaaacgattattatgacataacagaaaccaacatgattaaattttgttcttatctgtgcatgaaagatgctaacgataatattgtaaatggatggttagcttcgcaatcagatatgttggctgatgactggatggttgttggttaa

SEQ ID NO: 987 - DNA, 312 bp, synthetic construct
  misc_feature 1..312: note = NA sequence of anti-defense homologs identified (more details in the specs)
  source 1..312: mol_type = other DNA
atgaaatttggagaagctttagaagaagtaaaaaaaggtgcgttgattgcacgtgctggatggaatggaaaagggatgttcgtattccagcgcccggaagattggttgtctactgatatgatagttaataaagtaaagtcattgccagattcgtttaaaaaatatataaacgattattatgacataaccgaaaccaatatgattaaattctgtgcttatctgtgcatgaaagatgctaacgatgatattgtaaatggatgtttagcttcgcaatcagatatgttggctgacgactggatggtaattggttaa

SEQ ID NO: 988 - DNA, 183 bp, synthetic construct
  misc_feature 1..183: note = NA sequence of anti-defense homologs identified (more details in the specs)
  source 1..183: mol_type = other DNA
atgaaatttggagaagctttagaagaagtaaaaaaaggtgcgttgattgcacgtgccggatggaatggtaaaggtatgttcgtattccagcgcccggaagattggttgtctactgatatgatagttaataaagtaaagtcattgccggattcgtttaaaaaaatacgtaaacgattattatga

SEQ ID NO: 989 - DNA, 312 bp, synthetic construct
  misc_feature 1..312: note = NA sequence of anti-defense homologs identified (more details in the specs)
  source 1..312: mol_type = other DNA
atgaaatttggagaagctttagaagaagtaaaaaaaggtgcgttgattgcacgtgccggatggaatggtaaaggtatgttcgtattccagcgcccggaagattggttgtctactgatatgatagttaataaagtaaagtcattgccggattcgtttaaaaaatacgtaaacgattattatgacgtaactgaaaccaacatgattaaattttgcgcttatctgtgcatgaaagatgctaacgataatattgtaaacggatggttggcttcgcaatcagatatgttggctgatgactggatggtggttggttaa

SEQ ID NO: 990 - DNA, 312 bp, synthetic construct
  misc_feature 1..312: note = NA sequence of anti-defense homologs identified (more details in the specs)
  source 1..312: mol_type = other DNA
atgaaatttggagaagctttagaagaagtaaaaaaaggtgcgttgattgcacgtgccggatggaatggtaaaggtatgttcgtattccagcgcccggaagattggttgtctactgatatgatagttaataaagtaaagtcattgccggattcgtttaaaaaatacgtaaacgattattatgacgtaactgaaaccaacatgattaaattttgcgcttatctgtgcatgaaagatgctaacgataatatcgtaaacggatggttagcttcgcaatcagatatgttggctgatgactggatggtggttggttaa

SEQ ID NO: 991 - DNA, 312 bp, synthetic construct
  misc_feature 1..312: note = NA sequence of anti-defense homologs identified (more details in the specs)
  source 1..312: mol_type = other DNA
atgaaatttggagaagctttagaagaagtaaaaaaaggtgcgttgattgcacgtgccggatggaatggtaaaggtatgttcgtattccagcgccaggaagattggttgtctactgatatgatagttaataaagtaaagtcattgccggattcgttaaaaaaatacgtaaacgattattatgacgtaactgaaaccaacatgattaaattttgcgcttatctgtgcatgaaagatgctaacgataatatcgtaaacggatggttggcttcgcaatcagatatgttggctgatgactggatggttgttggttaa

SEQ ID NO: 992 - DNA, 312 bp, synthetic construct
  misc_feature 1..312: note = NA sequence of anti-defense homologs identified (more details in the specs)
  source 1..312: mol_type = other DNA
atgaaatttggagaagctttagaagaagtaaaaaaaggtgcgttgattgcacgtgctggatggaatggaaaagggatgttcgtattccagcgcccggaagattggttgtctactgatatgatagttaataaagtaaagtcattgccggattcgtttaaaaaatacgtaaacgattattatgacgtaactgaaaccaacatgattaaattttgtgcttatctgtgcatgaaagatgctaacgataatatcgtaaacggatggttggcttcgcaatcagatatgttggctgatgactggatggtggttggttaa

SEQ ID NO: 993 - DNA, 312 bp, synthetic construct
  misc_feature 1..312: note = NA sequence of anti-defense homologs identified (more details in the specs)
  source 1..312: mol_type = other DNA
atgaaatttggagaagctttagaagaagtaaaaaaaggtgcgttgattgcacgtgccggatggaatggtaaaggtatgttcgtattccagcgcccggaagattggttgtctactgatatgatagttaataaagtaaagtcattgccggattcgtttaaaaaatacgtaaacgattattatgacgtaactgaaaccaacatgattaaattttgcgcttatctgtgcatgaaagatgctaacgataatatcgtaaacggatggttagcttcgcaatcagatatgttggctgatgactggatggttgttggttaa

SEQ ID NO: 994 - DNA, 312 bp, synthetic construct
  misc_feature 1..312: note = NA sequence of anti-defense homologs identified (more details in the specs)
  source 1..312: mol_type = other DNA
atgaaatttggagaagctttagaggcagtaaaagaaggtaagttaattgctcgttcaggatggaatggtaaagatatgttcgtattccagcgaccggaagattggttgtctactgatataatagttaataaagtaaagtcattgccagattcgtttaaaaaatacgtaaacgattattatgacgtaactgaaaccaacatgattaaattttgcgcttatctgtgcatgaaagatgctaacgataatatcgtaaatggatggttagcttcgcaatcagatatgttggctgatgattggatggtagttggttaa

SEQ ID NO: 995 - DNA, 312 bp, synthetic construct
  misc_feature 1..312: note = NA sequence of anti-defense homologs identified (more details in the specs)
  source 1..312: mol_type = other DNA
atgaaatttggagaagctttagaggcagtaaaagaaggtaagttaattgctcgttcaggatggaatggtaaaggtatgttcgtattccagcgaccggaagattggttgtctactgatatgatagttaataaagtaaaatcattgccggattcgtttaaaaaatacgtaaacgattattatgacataacagaaaccaacatgattaaattttgttcttatctgtgcatgaaagatgctaacgataatattgtaaatggatggttagcttcgcaatcagatatgttggctgatgactggatggtagttggttaa

SEQ ID NO: 996 - DNA, 312 bp, synthetic construct
  misc_feature 1..312: note = NA sequence of anti-defense homologs identified (more details in the specs)
  source 1..312: mol_type = other DNA
atgaaatttggagaagctttagaggcagtaaaagaaggtaagttaattgctcgttcaggatggaatggtaaaggaatgttcgtattccagcgaccggaagattggttgtctactgatatgatagttaataaagtaaagtcattgccggattcgtttaaaaaatacgtaaacgattattatgacatagatgaaaccaacatgattaaattttgttcttatctgtgcatgaaagatgctaacaataatattgtaaatggatggttagcttctcaatcagatatgttggctgatgattggatggtagttggttaa

SEQ ID NO: 997 - DNA, 312 bp, synthetic construct
  misc_feature 1..312: note = NA sequence of anti-defense homologs identified (more details in the specs)
  source 1..312: mol_type = other DNA
atgaaatttggagaagctttagaggcagtaaaagaaggtaagttaattgcacgttcaggatggaacggtaagggaatgtttgtctttcagcgcccggaagattggttgtctactgatacgatagttaataaagtaaagtcattgccggattcgtttaaaaagtacgtaaaagattattatgacatagatgaaaccaacatgattaaattctgttcttatctgtgcatgaaagatgctaacgataatattgtaaatggatggttagcttctcaatcagatatgttggctgatgactggatggtggttggttaa

SEQ ID NO: 998 - DNA, 183 bp, synthetic construct
  misc_feature 1..183: note = NA sequence of anti-defense homologs identified (more details in the specs)
  source 1..183: mol_type = other DNA
atgaaatttggagaagctttagaggcagtaaaagaaggtaagttaattgctcgttcaggatggaatggtaaaggaatgttcgtattccagcgaccggaagattggttgtctactgatatgatagttaataaagtaaagtcattgccggattcgtttaaaaaaatacgtaaacgattattatga

SEQ ID NO: 999 - DNA, 312 bp, synthetic construct
  misc_feature 1..312: note = NA sequence of anti-defense homologs identified (more details in the specs)
  source 1..312: mol_type = other DNA
atgaaatttggagaagctttagaagaagtaaaaaaaggtgcgttgattgcacgtgccggatggaatggaaaaggtatgttcgtattccagcgccctgaagattggttgtctactgatatgatagttaataaagtaaagtcattgccggattcgtttaaaaaatacgtaaacgattattatgacgtaactgaaaccaacatgattaaattttgcgcttatctgtgcatgaaagatgctaacgataatatcgtaaacggatggttggcttcgcaatcagatatgttggctgatgactggatggtggttggttaa

SEQ ID NO: 1000 - DNA, 312 bp, synthetic construct
  misc_feature 1..312: note = NA sequence of anti-defense homologs identified (more details in the specs)
  source 1..312: mol_type = other DNA
atgaaatttggagaagctttagaggcagtaaaagaaggtaagttaattgcacgttcaggatggaacggtaagggaatgtttgtctttcagcgcccggaagattggttgtctactgatacgatagttaatagagtaaagtcattaccggattcgtttaaaaaatacgtaaacgattattatgacatagatgaaaccaacatgattaaattctgttcttatctgtgcatgaaagatgctaacgataatattgtaaatggatggttagcttcgcaatcagatatgttggctgatgactggatggtagttggttaa

SEQ ID NO: 1001 - DNA, 168 bp, synthetic construct
  misc_feature 1..168: note = NA sequence of anti-defense homologs identified (more details in the specs)
  source 1..168: mol_type = other DNA
atgaaatttggagaagctttagaggcagtaaaagaaggtaagttaattgctcgttcaggatggaatggtaaaggaatgttcgtattccagcgaccggaagattggttgtctactgatatgatagttaataaagtaaagtcattgccggattcgtttaaaaatacgtaa

SEQ ID NO: 1002 - DNA, 312 bp, synthetic construct
  misc_feature 1..312: note = NA sequence of anti-defense homologs identified (more details in the specs)
  source 1..312: mol_type = other DNA
atgaaatttggagaagctttagaggcagtaaaagaaggtaagttaattgctcgttcaggatggaatggtaaaggaatgttcgtattccagcgaccggaagattggttgtctactgatatgatagttaataaagtaaagtcattgccggattcgtttaaaaaatacgtaaacgattattatgacatagatgaaaccaacatgattaaattttgttcttatctgtgcatgaaagatgctaacgataatatcgtaaacggatggttagcttcgcaatcagatatgttggctgatgactggatggttgttggttaa

SEQ ID NO: 1003 - DNA, 312 bp, synthetic construct
  misc_feature 1..312: note = NA sequence of anti-defense homologs identified (more details in the specs)
  source 1..312: mol_type = other DNA
atgaaatttggagaagctttagaagaagtaaaaaaaggtgcgttgattgcacgtgccggatggaatggtaaaggtatgtttgtattccagcgtccggaagattggttgtctactgatatgatagttaataaagtaaagtcattgccggattcgtttaaaaaatacgtaaacgattattatgacgtaactgaaaccaacatgattaaattttgcgcttatctgtgcatgaaagatgctaacgataatatcgtaaacggatggttagcttcgcaatcagatatgttggctgatgactggatggttgttggttaa

SEQ ID NO: 1004 - DNA, 312 bp, synthetic construct
  misc_feature 1..312: note = NA sequence of anti-defense homologs identified (more details in the specs)
  source 1..312: mol_type = other DNA
atgaaatttggagaagctttggaagaagtaaaaaaaggtgcattaattgcacgcaaaggatggaatggaaaaggtatgttcgtattccagcgacctggagatatgttgtctacagatatgatagttaataaagtaaagtcattgccagattcgtttaaaaaatatataaacgattattatgacataaccgaaaccaatatgattaaattctgtgcttatctatgcatgaaagatgctaacgatgatattgtaaatggatgggtagcttcgcaatcagatatgttggctgacgactggatggtaattggttaa

SEQ ID NO: 1005 - DNA, 312 bp, synthetic construct
  misc_feature 1..312: note = NA sequence of anti-defense homologs identified (more details in the specs)
  source 1..312: mol_type = other DNA
atgaaatttggagaagctttagaggcagtaaaagaaggtaagttaattgcacgttcaggatggaacggtaagggaatgtttgtctttcagcgcccggaagattggttgtctactgatacgatagttaatagagtaaagtcattaccggattcgtttaaaaagtacgtaaaagattattatgacatagatgaaaccaacatgattaaattctgttcttatctgtgcatgaaagatgctaacgataatattgtaaatggatggttagcttctcaatcagatatgttggctgatgattggatggtagttggttaa

SEQ ID NO: 1006 - DNA, 312 bp, synthetic construct
  misc_feature 1..312: note = NA sequence of anti-defense homologs identified (more details in the specs)
  source 1..312: mol_type = other DNA
atgaaatttggagaagctttagaagaagtaaaaaaaggtgcgttgattgcacgtgccggatggaatggtaaaggtatgttcgtattccagcgcccggaagattggttgtctactgatatggtagttaataaagtaaagtcattgccggattcgtttaaaaaatacgtaaacgattattatgacgtaactgaaaccaacatgattaaattctgcgcttatctgtgcatgaaagatgctaacgataatatcgtaaacggatggttagcttcgcaatcagatatgttggctgatgactggatggtagttggttaa

SEQ ID NO: 1007 - DNA, 312 bp, synthetic construct
  misc_feature 1..312: note = NA sequence of anti-defense homologs identified (more details in the specs)
  source 1..312: mol_type = other DNA
atgaaatttggagaagctttagaagaagtaaaaaaaggtgcgttgattgcacgtgccggatggaatggtaaaggtatgtttgtattccagcgcccggaagattggttgtccactgatatgatagttaataaagtaaagtcattgccggattcgttaaaaaaatacgtaaacgattattatgacgtaactgaaaccaacatgattaaattttgcgcttatctgtgcatgaaagatgctaacgataatatcgtaaacggatggttagcttcgcaatcagatatgttggctgatgattggatggttgttggttaa

SEQ ID NO: 1008 - DNA, 312 bp, synthetic construct
  misc_feature 1..312: note = NA sequence of anti-defense homologs identified (more details in the specs)
  source 1..312: mol_type = other DNA
atgaaatttggagaagctttagaagcagtaaaagaaggcaagttaattgctcgttcaggatggaatggtaaaggtatgttcgtattccagcgcccggaagattggttgtctactgatacgatagttaatagagtaaagtcattaccggattcgtttaaaaagtacgtaaaagattattatgacatagatgaaaccaacatgattaaattctgttcttatctgtgcatgaaagatgctaacgataatattgtaaatggatggttagcttctcaatcagatatgttggctgatgattggatggtagttggttaa

SEQ ID NO: 1009 - DNA, 195 bp, synthetic construct
  misc_feature 1..195: note = NA sequence of anti-defense homologs identified (more details in the specs)
  source 1..195: mol_type = other DNA
atgaaatttggagaagctttagaagaagtaaaaaaaggtgcgttgattgcacgtgccggatggaatggtaaaggtatgttcgtattccagcgccaggaagattggttgtctactgatatgatagttaataaagtaaagtcattgccggattcgttatcagatatgttggctaatgactggatggtggttggttaa

SEQ ID NO: 1010 - DNA, 312 bp, synthetic construct
  misc_feature 1..312: note = NA sequence of anti-defense homologs identified (more details in the specs)
  source 1..312: mol_type = other DNA
atgaaatttggagaagctttagaagaagtaaaaaaaggtgcgttgattgcacgtgccggatggaatggtaaaggtatgttcgtattccagcgccaggaagattggttgtctactgatatgatagttaataaagtaaagtcattgccggattcgtttaaaaaatacgtaaacgattattatgacgtaactgaaaccaacatgattaaattttgcgcttatctgtgcatgaaagatgctaacgataatatcgtaaacggatggttggcttcgcaatcagatatgttggctgatgactggatggtggttggttaa

SEQ ID NO: 1011 - DNA, 312 bp, synthetic construct
  misc_feature 1..312: note = NA sequence of anti-defense homologs identified (more details in the specs)
  source 1..312: mol_type = other DNA
atgaaatttggagaagctttagaagaagtaaaaaaaggtgcgttgattgcacgtgccggatggaatggtaaaggtatgttcgtattccagcgaccggaagattggttgtctactgatatgatagttaataaagtaaagtcattgccggattcgtttaaaaaatacgtaaacgattattatgacgtaactgaaaccaacatgattaaattttgcgcttatctgtgcatgaaagatgctaacgataatatcgtaaacggatggttagcttcgcaatcagatatgttggctgatgactggatggttgttggttaa

SEQ ID NO: 1012 - DNA, 312 bp, synthetic construct
  misc_feature 1..312: note = NA sequence of anti-defense homologs identified (more details in the specs)
  source 1..312: mol_type = other DNA
atgaaatttggagaagctttagaggcagtaaaagaaggtaagttaattgctcgttcaggatggaatggtaaaggaatgttcgtattccagcgcccggaagattggttgtctactgatacgatagttaataaagtaaagtcattgccggattcgtttaaaaagtacgtaaaagattattatgacatagatgaaaccaacatgattaaattctgttcttatctgtgcatgaaagatgctaacgataatattgtaaatggatggttagcttctcaatcagatatgttggctgatgattggatggtagttggttaa

SEQ ID NO: 1013 - DNA, 312 bp, synthetic construct
  misc_feature 1..312: note = NA sequence of anti-defense homologs identified (more details in the specs)
  source 1..312: mol_type = other DNA
atgaaatttggagaagctttagaggcagtaaaagaaggtaagttaattgcacgttcaggatggaacggtaagggaatgtttgtctttcagcgcccggaagattggttgcctactgatatgatagttaatagagtaaagtcattaccggattcgtttaaaaaatacgtaaacgattattatgacatagatgaaaccaacatgattaaattctgttcttatctgtgcatgaaagatgctaacgataatgttgtaaatggatggttagcttcgcaatcagatatgttggctgatgactggatggtagttggttaa

SEQ ID NO: 1014 - DNA, 312 bp, synthetic construct
  misc_feature 1..312: note = NA sequence of anti-defense homologs identified (more details in the specs)
  source 1..312: mol_type = other DNA
atgaaatttggagaagctttagaggcagtaaaagaaggtaagttaattgcacgttcaggatggaacggtaagggaatgtttgtctttcagcgcccggaagattggttgtctactgatacgatagttaatagagtaaagtcattaccggattcgtttaaaaagtacgtaaaagattattatgacatagatgaaaccaacatgattaaattctgttcttatctgtgcatgaaagatgctaacgataatattgtaaatggatggttagcttcgcaatcagatatgttggctgatgactggatggtagttggttaa

SEQ ID NO: 1015 - DNA, 147 bp, synthetic construct
  misc_feature 1..147: note = NA sequence of anti-defense homologs identified (more details in the specs)
  source 1..147: mol_type = other DNA
atgaaatttggagaagctttagaggcagtaaaagaaggtaagttaattgctcgttcaggatggaatggtaaaggtatgttcgtattccagcgaccggaagattggttgtctactgatataaccccaaatagtattaaactaatataa

SEQ ID NO: 1016 - DNA, 312 bp, synthetic construct
  misc_feature 1..312: note = NA sequence of anti-defense homologs identified (more details in the specs)
  source 1..312: mol_type = other DNA
atgaaatttggagaagctttagaagaagtaaaaaaaggtgcgttgattgcacgtgccggatggaatggaaaaggtatgttcgtattccagcgcccggaagattggttgtctactgatatgatagttaataaagtaaagtcattgccagattcgtttaaaaaatacgtaaacgattattatgacgtaactgaaaccaacatgattaaattttgcgcttatctgtgcatgaaagatgctaacgataatatcgtaaacggatggttagcttcgcaatcagatatgttggctgatgactggatggtaattggttaa

SEQ ID NO: 1017 - DNA, 312 bp, synthetic construct
  misc_feature 1..312: note = NA sequence of anti-defense homologs identified (more details in the specs)
  source 1..312: mol_type = other DNA
atgaaatttggagaagctttagaggcagtaaaagaaggtaagttaattgctcgttcaggatggaatggtaaaggaatgttcgtattccagcgaccggaagattggttgtctactgatatgatagttaataaagtaaagtcattgccggattcgtttaaaaaatacgtaaacgattattatgacatagatgaaaccaacatgattaaattttgttcttatctgtgcatgaaagatgctaacgataatatcgtaaatggatggttagcttctcaatcagatatgttggctgatgattggatggtagttggttaa

SEQ ID NO: 1018 - DNA, 312 bp, synthetic construct
  misc_feature 1..312: note = NA sequence of anti-defense homologs identified (more details in the specs)
  source 1..312: mol_type = other DNA
atgaaattcggagaagctttagaggcagtaaaagaaggtaagttaattgctcgttcaggatggaatggtaaaggtatgttcgtattccggcgaccggaagattggttgtctactgatatgatagttaataaagtaaagtcattgccggattcgtttaaaaaatacgtaaacgattattatgacataacagaaaccaacatgattaaattttgttcttatctgtgcatgaaagatgctaacgataatattgtaaatggatggttagcttcgcaatcagatatgttggctgatgaccggatggtagttggttaa

SEQ ID NO: 1019 - DNA, 324 bp, synthetic construct
  misc_feature 1..324: note = NA sequence of anti-defense homologs identified (more details in the specs)
  source 1..324: mol_type = other DNA
atgaaatttggagaagctttagaagaagtaaaaaaaggtgcgttgattgcacgtgccggatggaatggtaaaggtatgtttgtattccagcgtccggaagattggttgtctactgatatgatagttaataaagtaaagtcattgccggattcgtttaaaaaatacgtaaacgattattatgacgtatattatgacgtaactgaaaccaacatgattaaattttgcgcttatctgtgcatgaaagatgctaacgataatatcgtaaacggatggttagcttcgcaatcagatatgttggctgatgactggatggttgttggttaa

SEQ ID NO: 1020 - DNA, 312 bp, synthetic construct
  misc_feature 1..312: note = NA sequence of anti-defense homologs identified (more details in the specs)
  source 1..312: mol_type = other DNA
atgaaatttggagaagctttagaggcagtaaaagaaggtaagttaattgctcgttcaggatggaatggtaaaggtatgttcgtattccagcgaccggaagattggttgtctactgatatgatagttaatagagtaaagtcattgcctgattcgtttaaaaaatacgtaaacgactattatgacataacagaaaccaacatgattaaattctgttcttatctgtgcatgaaagatgctaacgataatattgtaaatggatggttagcttctcaatcagatatgttggctgatgactggatggtagttggttaa

SEQ ID NO: 1021 - DNA, 147 bp, synthetic construct
  misc_feature 1..147: note = NA sequence of anti-defense homologs identified (more details in the specs)
  source 1..147: mol_type = other DNA
atgaaatttggagaagctttagaagaagtaaaaaaaggtgcgttgattgcacgtgccggatggaatggtaaaggtatgtttgtattccagcgcccggaagattggttgtctactgatataatcccaaatagtattaacctgatataa

SEQ ID NO: 1022 - DNA, 312 bp, synthetic construct
  misc_feature 1..312: note = NA sequence of anti-defense homologs identified (more details in the specs)
  source 1..312: mol_type = other DNA
atgaaatttggagaagctttagaggcagtaaaagaaggtaagttaattgctcgttcaggatggaatggtaaagatatgttcgtattccagcgaccggaagattggttgtctactgatatgatagttaataaagtaaagtcattgccagattcgtttaaaaaatacgtaaacgattattatgacgtaactgaaaccaacatgattaaattttgcgcttatctgtgcatgaaagatgctaacgataatatcgtaaatggatggttagcttcgcaatcagatatgttggctgatgattggatggtagttggttaa

SEQ ID NO: 1023 - DNA, 312 bp, synthetic construct
  misc_feature 1..312: note = NA sequence of anti-defense homologs identified (more details in the specs)
  source 1..312: mol_type = other DNA
atgaaatttggagaagctttagaagaagtaaaaaaaggtgcgttgattgcacgtgccggatggaatggtaaaggtatgttcgtattccagcgccaggaagattggttgtctactgatatgatagttaataaagtaaagtcattgccggattcgtttaaaaaatacgtaaacgattattatgacgtaactgaaaccaacatgattaaattttgcgcttatctgtgcataaaagatgctaacaataatatcgtaaacggatggttggcttcgcaatcagatatgttggctgatgactggatggtggttggttaa

SEQ ID NO: 1024 - DNA, 312 bp, synthetic construct
  misc_feature 1..312: note = NA sequence of anti-defense homologs identified (more details in the specs)
  source 1..312: mol_type = other DNA
atgaaatttggagaagctttagaagaagtaaaaaaaggtgcgttgattgcacgttccggatggaatggtaaaggtatgtttgtattccagcgtccggaagattggttgtctactgatatgatagttaataaagtaaagtcattgccggattcgtttaaaaaatacgtaaacgattattatgccgtaactgaaaccaacatgattaaattttgcgcttatctgtgcatgaaagatgctaacgataatatcgtaaacggatggttagcttcgcaatcagatatgttggctgatgactggatggttgttggttaa

SEQ ID NO: 1025 - DNA, 312 bp, synthetic construct
  misc_feature 1..312: note = NA sequence of anti-defense homologs identified (more details in the specs)
  source 1..312: mol_type = other DNA
atgaaatttggagaagctttagaagaagtaaaaaaaggtgcgttgattgcacgtgccggatggaatggtaaaggtatgtttgtattccagcgcccggaagattggttgtctactgatatgatagttaataaagtaaagtcgttgccggattcgtttaaaaaatacgtaaacgattattatgacgtaactgaaaccaacatgattaaattttgcgcttatctgtgcatgaaagatgctaacgataatatcgtaaacggatggttagcttcgcaatcagatatgttggctgatgactggatggttgttggttaa

SEQ ID NO: 1026 - DNA, 312 bp, synthetic construct
  misc_feature 1..312: note = NA sequence of anti-defense homologs identified (more details in the specs)
  source 1..312: mol_type = other DNA
atgaaatttggagaagctttagaagaagtaaaaaaaggtgcgttgattgcacgtgccggatggaatggtaaaggtatgttcgtattccagcgcccggaagattggttgtctactgatattatagttaataaagtaaagtcattgccggattcgtttaaaaaatacgtaaacgattattatgacgtaactgaaaccaacatgattaaattttgcgcttatctgtgcatgaaagatgctaacgataatatcgtaaacggatggttggcttcgcaatcagatatgttggctgatgactggatggtggttaaataa

SEQ ID NO: 1027 - DNA, 312 bp, synthetic construct
  misc_feature 1..312: note = NA sequence of anti-defense homologs identified (more details in the specs)
  source 1..312: mol_type = other DNA
atgaaatttggagaagctttagaagaagtaaaaaaaggtgcgttgattgcacgtgccggatggaatggtaaaggtatgttcgtattccagcgcccggaagattggttgtccactgatatgatagttaataaagtaaagtcattgccggattcgttaaaaaaatacgtaaacgattattatgacgtaactgaaaccaacatgattaaattttgcgcttatctgtgcatgaaagatgctaacgataatatcgtaaacggatggttagcttcgcaatcagatatgctggctgatgattggatggttgttggttaa

SEQ ID NO: 1028 - DNA, 312 bp, synthetic construct
  misc_feature 1..312: note = NA sequence of anti-defense homologs identified (more details in the specs)
  source 1..312: mol_type = other DNA
atgaaatttggagaagctttagaggcagtaaaagaaggtaagttaattgcacgttcaggatggaacggtaaaggaatgtttgtctttcagcgcccggaagattggttgtctactgatatgatagttaataaagtaaagtcattgccggattcgtttaaaaaatacgtaaacgattattatgacgtaactgaaaccaacatgattaaattttgcgcttatctgtgcatgaaagatgctaacgataatatcgtaaacggatggttggcttcgcaatcagatatgttggctgatgactggatggtggttggttaa

SEQ ID NO: 1029 - DNA, 312 bp, synthetic construct
  misc_feature 1..312: note = NA sequence of anti-defense homologs identified (more details in the specs)
  source 1..312: mol_type = other DNA
atgaaatttggagaagctttagaagaagtaaaaaaaggtgcgttgattgcacgtgccggatggaatggtaaaggtatgttcgtattccagcgcccggaagattggttgtctactgatattatagttaataaagtaaagtcattgccggattcgtttaaaaaatacgtaaacgattattatgacgtaactgaaaccaacatgattaaattttgcgcttatctgtgcatgaaagatgctaacgataatatcgtaaacggatggttggcttcgcaatcagatatgttggctgatgactggatggtggttggttaa

SEQ ID NO: 1030 - DNA, 312 bp, synthetic construct
  misc_feature 1..312: note = NA sequence of anti-defense homologs identified (more details in the specs)
  source 1..312: mol_type = other DNA
atgaaatttggagaagctttagaagaagtaaaaaaaggtgcgttgattgcacgtgccggatggaatggtaaaggtatgttcgtattccagcgccaggaagattggttgtctactgatatgatagttaataaagtaaagtcattgccggattcgtttaaaaaatacgtaaacgattattatgacgtaactgaaaccaacatgattaaattttgcgcttatctgtgcatgaaagatgctaacgataatatcgtaaacggatggttagcgtcgcaatcagatatgttggctgatgactggatggtggttggttaa

SEQ ID NO: 1031 - DNA, 312 bp, synthetic construct
  misc_feature 1..312: note = NA sequence of anti-defense homologs identified (more details in the specs)
  source 1..312: mol_type = other DNA
atgaaatttggagaagctttagaggcagtaaaagaaggtaagttaattgctcgttcaggatggaatggtaaaggtatgttcgtattccagcgaccggaagattggttgtctactgatatgatagttaataaagtaaaatcattgccggattcgtttaaaaaatacgtaaacgattattatgacataacagaaaccaacatgattaaattctgttcttatctgtgcatgaaagatgctaacgataatattgtaaatggatggttagcttctcaatcagatatgttggctgatgattggatagtagttggttaa

SEQ ID NO: 1032 - DNA, 312 bp, synthetic construct
  misc_feature 1..312: note = NA sequence of anti-defense homologs identified (more details in the specs)
  source 1..312: mol_type = other DNA
atgaaatttggagaagctttagaggcagtaaaagaaggtaagttaattgcacgttcaggatggaacggtaagggaatgtttgtctttcagcgcccggaagattggttgtctactgatacgatagttaatagagtaaagtcattaccggattcgtttaaaaagtacgtaaaagattattatgacatagatgaaaccaacatgattaaattctgttcttatctgtgcatgaaagatgctaacgataatatcgtaaacggatggttagcttcgcaatcagatatgttggctgatgactggatggtggttggttaa

SEQ ID NO: 1033 - DNA, 312 bp, synthetic construct
  misc_feature 1..312: note = NA sequence of anti-defense homologs identified (more details in the specs)
  source 1..312: mol_type = other DNA
atgaaatttggagaagctttagaagaagtaaaaaaaggtgcgttgattgcacgtgccggatggaatggaaaaggtatgttcgtattccagcgcccggaagattggttgtctactgatatgatagttaataaagtaaagtcattgccagattcgtttaaaaaatacgtaaacgattattatgacgtaactgaaaccaacatgattaaattttgcgcttatctgtgcatgaaagatgctaacgataatatcgtaaacggatggttagcttcgcaatcagatatgttggctgatgactggatggttgttggttaa

SEQ ID NO: 1034 - DNA, 312 bp, synthetic construct
  misc_feature 1..312: note = NA sequence of anti-defense homologs identified (more details in the specs)
  source 1..312: mol_type = other DNA
atgaaatttggagaagctttagaagaagtaaaaaaaggtgcgttgattgcacgtgccggatggaatggtaaaggtatgttcgtattccagcgccaggaagattggttgtctactgatatgatagttaataaagtaaagtcattgccggattcgtttaaaaaatacgtaaacgattattatgacgtaactgaaaccaacatgattaaattttgcgcttatctgtgcatgaaagatgctaacgataatatcgtaaacggatggttagcttcgcaatcagatatgttggctgatgactggatggttgttggttaa

SEQ ID NO: 1035 - DNA, 312 bp, synthetic construct
  misc_feature 1..312: note = NA sequence of anti-defense homologs identified (more details in the specs)
  source 1..312: mol_type = other DNA
atgaaatttggagaagctttagaggcagtaaaagaaggtaagttaattgcacgttcaggatggaacggtaagggaatgtttgtctttcagcgcccggaagattggttgtctactgatacgatagttaatagagtaaagtcattaccggattcgtttaaaaagtacgtaaaagattattatgacatagatgaaactaacatgattaaattctgttcttatctgtgcatgaaagatgctaacgataatattgtaaatggatggttagcttcgcaatcagatatgttgtctgatgattggatggtagttggttaa

SEQ ID NO: 1036 - DNA, 312 bp, synthetic construct
  misc_feature 1..312: note = NA sequence of anti-defense homologs identified (more details in the specs)
  source 1..312: mol_type = other DNA
atgaaatttggagaagctttagaagaagtaaaaaaaggtgcgttgattgcacgtgccggatggaatggtaaaggtatgttcgtattccagcgcccggaagattggttgtctactgatatgatagttaataaagtaaagtcattgccggattcgtttaaaaaatacgtaaacgattattatgacgtaactgaaaccaacatgattaaattttgcgcttatctgtgcatgaaagatgctaacgataatatcgtaaacggatggttggcttcgcaatcagatatgttggatgatgactggatggtggttggttaa

SEQ ID NO: 1037 - DNA, 312 bp, synthetic construct
  misc_feature 1..312: note = NA sequence of anti-defense homologs identified (more details in the specs)
  source 1..312: mol_type = other DNA
atgaaatttggagaagctttagaagaagtaaaaaaaggtgcgttgattgcacgtgccggatggaatggtaaaggtatgttcgtattccagcgcccggaagattggttgtctactgatatgatagttaataaagtaaagtcattgccggattcgtttaaaaaatacgtaaacgattattatgacgtaactgaaaccaacatgattaaattttgcgcttatctgtgcatgaaagatgctaacgataatatcgtaaacggatggttggcttcgcaatcagatatgttggctgatgactggatggttgttggttaa

SEQ ID NO: 1038 - DNA, 312 bp, synthetic construct
  misc_feature 1..312: note = NA sequence of anti-defense homologs identified (more details in the specs)
  source 1..312: mol_type = other DNA
atgaaatttggagaagctttagaggcagtaaaagaaggtaagttaattgctcgttcaggatggaatggtaaaggaatgttcgtattccagcgaccggaagattggttgtctactgatatgatagttaataaagtaaagtcattgccggattcgtttaaaaaatacgtaaacgattattatgacataacagaaaccaacatgattaaattttgttcttatctgtgcatgaaagatgctaacgataatattgtaaatggatggttagcttctcaatcagatatgttggctgatgactggatggtagttggttaa

SEQ ID NO: 1039 - DNA, 312 bp, synthetic construct
  misc_feature 1..312: note = NA sequence of anti-defense homologs identified (more details in the specs)
  source 1..312: mol_type = other DNA
atgaaatttggagaagctttagaagaagtaaaaaaaggtgcgttgattgcacgtgccggatggaatggaaaaggtatgttcgtattccagcgcccggaagattggttgtctactgatatgatagttaataaagtaaagtcattgccagattcgtttaaaaaatacgtaaacgattattatgacgtaactgaaaccaacatgattaaattttgcacttatctgtgcatgaaagatgctaacgataatatcgtaaacggatggttagcttcgcaatcagatatgttggctgatgactggatggtggttggttaa

SEQ ID NO: 1040 - DNA, 312 bp, synthetic construct
  misc_feature 1..312: note = NA sequence of anti-defense homologs identified (more details in the specs)
  source 1..312: mol_type = other DNA
atgaaatttggagaagctttagaagaagtaaaaaaaggtgcgttgattgcacgtgctggatggaatggaaaagggatgttcgtattccagcgcccggaagattggttgtctactgatatgatagttaataaagtaaagtcattgccggattcgtttaaaaaatacgtaaacgattattatgacgtaactgaaaccaacatgattaaattttgtgcttatctgtgcatgaaagatgctaacgataatatcgtaaacggatggttagcatcgcaatcagatatgttggctgatgactggatggtggttggttaa

SEQ ID NO: 1041 - DNA, 312 bp, synthetic construct
  misc_feature 1..312: note = NA sequence of anti-defense homologs identified (more details in the specs)
  source 1..312: mol_type = other DNA
atgaaatttggagaagctttagaggcagtaaaagaaggtaagttaattgcacgttcaggatggaacggtaagggaatgtttgtctttcagcgcccggaagattggttgtctactgatacgatagttaatagagtaaagtcattaccggattcgtttaaaaaatacgtaaacgattattatgacatagatgaaaccaacatgattaaattctgttcttatctgtgcatgaaagatgctaacgataatattgtaaatggatggttagcttcgcaatcaaatatgttggctgatgactggatggtagttggttaa

SEQ ID NO: 1042 - DNA, 312 bp, synthetic construct
  misc_feature 1..312: note = NA sequence of anti-defense homologs identified (more details in the specs)
  source 1..312: mol_type = other DNA
atgaaatttggagaagctttagaggcagtaaaagaaggcaagttaattgctcgttcaggatggaatggtaaaggtatgttcgtattccagcgaccggaagattggttgtctactgatatgatagttaataaagtaaagtcattgccggattcgtttaaaaaatacgtaaacgattattatgacataacagaaaccaacatgattaaattctgttcttatctgtgcatgaaagatgctaacgataatattgtaaatggatggttagcttcgcaatcagatatgttggctgatgactggatggtagttggttaa

SEQ ID NO: 1043 - DNA, 294 bp, synthetic construct
  misc_feature 1..294: note = NA sequence of anti-defense homologs identified (more details in the specs)
  source 1..294: mol_type = other DNA
atgacattcggtgatgcgattgaggctttgaagcagggaaagcgggttgcacgcagtggctggaatggaaaagggatgttcctctggctgaaacctgcggttgagatcaaagcggaatggtgtaaggacgaggctttaaaaaagctggtcgttgaaaacggtggaacgattctcggtatcggcacaatttgcatgtacacgcatgacagcaccggacgaaaagcgatcctgaccggctggttggcttcgcagtcggacatgctgctggaagactgggttattctggaggattga

SEQ ID NO: 1044 - DNA, 294 bp, synthetic construct
  misc_feature 1..294: note = NA sequence of anti-defense homologs identified (more details in the specs)
  source 1..294: mol_type = other DNA
atgacatttggtgatgcgattgaggctttgaagcagggaaaacgggttacacgcagtggttggaatggaaaagggatgttcctctggctgaaacctgcggttgagatcaaagcggagtggtgcaaggatgagactctgaagaagctggttgtcgaaaacggcggaacaattcttggcctcggcacgatctgcatgtatacgcacgacagcaccggacgaaaagcgatcctgaccggctggttggcttcgcagtcggatatgctgctggaagactgggttattctggaggattga

SEQ ID NO: 1045 - DNA, 519 bp, synthetic construct
  misc_feature 1..519: note = NA sequence of anti-defense homologs identified (more details in the specs)
  source 1..519: mol_type = other DNA
atgatttttaaagaagcgtttgaattaatgaaacagggtgcgaaagtaaaattgccgggatggaacggatactggtgttgggataatgataagcagacgattatgattcattgcagaccaaaggattccgacaaaggacagggagatgttcttgatatccgtgaaacgcagagagtggaatatacttttatgcacacgcagagggatgactggatgattgctgatgaaaagaattgcggtgctcttggcggtcggtcaacatttggatttggtgatgctatccgttatctgaaaagaggacttaaggtagctcgtaaaggttggaatggtaaagagatgttcttgtttgtcgcagatgaaatccatttctttacgaaaacagaactgaaaaagaaaaatgatgaaccttacgatatgctcccgtcaattactatgaaaacagcagataataaatgcgttgtcggatgggttccgtctcaaactgatatgtttgcagaagattggatgtttgtggaatga

SEQ ID NO: 1046 - protein, 89 aa, synthetic construct
  REGION 1..89: note = AA sequence of anti-defense homologs identified (more details in the specs)
MKTKMSFGEALEVLKQGMQVYRSGWNGKNMFLFLKSSDALASDFGFGFGEYINEPVFGNIIFIKTADNKIHAWVPSQTDVLAEDWDIVS

SEQ ID NO: 1047 - protein, 81 aa, synthetic construct
  REGION 1..81: note = AA sequence of anti-defense homologs identified (more details in the specs)
MNFGKAIEAMKEGRAVRRKGWNGKGIFIKIQSPDENSFMSHSYIYIDTTGLKTDNPDAPKNRVPWLASQTDMLAEDWVLAE

SEQ ID NO: 1048 - protein, 83 aa, synthetic construct
  REGION 1..83: note = AA sequence of anti-defense homologs identified (more details in the specs)
MKEMTFGGALEALKAGKKVARTGWNGKGMYLYLADGKLLTQEIGDGSYPFTDSIVMKTADNRYCIGWLASQTDMLAEDWCIVK

SEQ ID NO: 1049 - protein, 92 aa, synthetic construct
  REGION 1..92: note = AA sequence of anti-defense homologs identified (more details in the specs)
MRINNMNFGEALEALKLGQKVAREGWNGKGMFLFLVPGSVFNVSRPPLLGIYPAGTEIRYRPHVDMKTAQGDVVPWLCSQTDMLAEDWGIVH

SEQ ID NO: 1050 - protein, 159 aa, synthetic construct
  REGION 1..159: note = AA sequence of anti-defense homologs identified (more details in the specs)
MTQHIGVKLINAFPMTRQAYNDFRGWQLPAGENGEDEGYLVEYLDGGKPNTDRFDGYVSWSPKEVFEKAYRPVSGLSFGLAMEALKQGKSLQRVGWNGKDQFVYLVKGEKLASALGYGFGEYVGEPTFNDTLVLKNSQNRLATWVPSIGDLMAEDWQII

SEQ ID NO: 1051 - protein, 88 aa, synthetic construct
  REGION 1..88: note = AA sequence of anti-defense homologs identified (more details in the specs)
MDSLNFGKALEALKEGKKVSREGWNGKGMFAYYVPGGVYKSQTDVIKNTFGEEVKYRPYLALKTVDNDIATWTPSVSDILAEDWNIVE

SEQ ID NO: 1052 - protein, 147 aa, synthetic construct
  REGION 1..147: note = AA sequence of anti-defense homologs identified (more details in the specs)
MTKDYYGTKRITAWPEDRDGKPGYAVKYADGYISWSPADVFEAAYQPVTGMSFGHALQALKEGHRVARAGWNGKGMWVALTPGSSFAAACAKPGHAAFHRACEMEDQHQSVNLLPHLDMRAADGSMVIGWLASQTDMLADDWQIVEG

SEQ ID NO: 1053 - protein, 135 aa, synthetic construct
  REGION 1..135: note = AA sequence of anti-defense homologs identified (more details in the specs)
MVHSKYGYEPPEWVQADARLDKWYKDKRRANKHGAFSLEKNKEEAIMNFGEAIKALKLGKRVARKGWNGKGIFIKLKKGESLNTPNNRFNEVMTHDFIYIDTTGLRTNNPNAPMDRVPWLASQTDMLADDWVVVE

SEQ ID NO: 1054 - protein, 90 aa, synthetic construct
  REGION 1..90: note = AA sequence of anti-defense homologs identified (more details in the specs)
MNFGKALEALKQGKKVSREGWNGQGMFAVLQKGYPDGIPCNKQTAEAWGLKEGDLFKVRPYFQLRTAQGDHAMWVPSGSDILSEDWIIID

SEQ ID NO: 1055 - protein, 94 aa, synthetic construct
  REGION 1..94: note = AA sequence of anti-defense homologs identified (more details in the specs)
MGGIYNFSEALELLKEGYRLAREGWNGKGMFVCLQAGYPEGVAINQNTADATGLPVGTVCVFRPYLMMFTADRQFVPWVASQSDLLAEDWVLAE

SEQ ID NO: 1056 - protein, 151 aa, synthetic construct
  REGION 1..151: note = AA sequence of anti-defense homologs identified (more details in the specs)
MSKVKIISDGVKTRVFIDDKPITRVTSLKLSQSAMEAPKLTLEIAPKSLEIDGKDIPIEFSEDVSVKNSFGYALELLKHGKAVKRRGWNGKNMFLSYVTAAEWNPKHRNLLLGWLKLGFIAIKTADDYVVPWQPSQADMLTEDWEEVELWK

SEQ ID NO: 1057 - protein, 166 aa, synthetic construct
  REGION 1..166: note = AA sequence of anti-defense homologs identified (more details in the specs)
MKKYIGTKQIEAEPMTLGEAYSKGLVKSEIEENESYKLGYHTRTEYGYESWSPKELFEESYREVKEETPICFGDAIEVLKQGGAIRRKGWNGKGLFVIKQIPAHIESDIIPKMQSLPQSAKDLILKGKGFIDYTSQCLIYNENTGRADSWVPSISDVFAEDWEIVK

SEQ ID NO: 1058 - protein, 81 aa, synthetic construct
  REGION 1..81: note = AA sequence of anti-defense homologs identified (more details in the specs)
MNFGQALEALKAGKKVARGGWNGKGIFIELQRPDAHSKMTHPYIFIDTTGLQTDNPQAPKSRVPWLASQTDMLAEDWGVVE

SEQ ID NO: 1059 - protein, 98 aa, synthetic construct
  REGION 1..98: note = AA sequence of anti-defense homologs identified (more details in the specs)
MHTYSVALDAVKVGKRIARAGWNGKGMFVFQRPGDTLSCNIITNVKSLPDSVKTFLVAQERDILFLPYLCMYAADGSIVNGWLASQTDMLADDWTILD

SEQ ID NO: 1060 - protein, 86 aa, synthetic construct
  REGION 1..86: note = AA sequence of anti-defense homologs identified (more details in the specs)
MNFGQAIEAVKEGNKIARKGWNGKGMFVYYVPAASYPPATDIMKEVFEGEYVPYREYLALKTAQNDVATWAPSTSDALAEDWEVVE

SEQ ID NO: 1061 - protein, 78 aa, synthetic construct
  REGION 1..78: note = AA sequence of anti-defense homologs identified (more details in the specs)
MDFGSALNELKAGNKVQRDGWNGKGLWLELQHPDENSKMTLPYLFLSYPDDAANTPGARVPWLASQTDVLAEDWKRVA

SEQ ID NO: 1062 - protein, 147 aa, synthetic construct
  REGION 1..147: note = AA sequence of anti-defense homologs identified (more details in the specs)
MTQDYYGTKRITAWPATGEDGQAEGYAVKYADGYTSWSPKDVFEAAYQPLGSLSFGHALVALKAGHRVARAGWNGKGMWLAIQEGSTIAAEYARGGATKGRANEGAAEISILPHIDMRAADGSIVVGWLASQTDMLADDWTIVGGEI

SEQ ID NO: 1063 - protein, 179 aa, synthetic construct
  REGION 1..179: note = AA sequence of anti-defense homologs identified (more details in the specs)
MLPNKVTPEAMEARIAATQYTHPEGTTLTFCILHLDNGYTVTGESACVDPANFDAELGRKIAHEQAFDKLWPLFGFLLAEDRYREAGDSKATGLDFGEALKILRAGGAVKRAGWNGQGMYVFWLQGSNTIAKIHGFGFGEYMGEPVFRDALFMYTANGELVPWSVAQSDALAEDWEIVQ

SEQ ID NO: 1064 - protein, 161 aa, synthetic construct
  REGION 1..161: note = AA sequence of anti-defense homologs identified (more details in the specs)
MDKYIGVKIIQAEPMTRGDYNKFKGWTIPQDEDPNDEGYLVKYKDGYISWSPKGIFEDSNRKTDGMTFGFAVEAMKNGFKVCRKGWNGKGMFIYLTTGSIVPVVNLKSETVKHLYGERLLECDECVEIRSHVDMKAADGTITIGWNPSQVDMLAEDWQIVN

SEQ ID NO: 1065 - protein, 93 aa, synthetic construct
  REGION 1..93: note = AA sequence of anti-defense homologs identified (more details in the specs)
MLKIREEKKMNFGKALEEVKKGKKTARKGWNGKNQYIELATAISYVNVNGELVNCNHDAIGNKAIAFVGTSGVQIGWLASQADMLAEDWEVVG

SEQ ID NO: 1066 - protein, 95 aa, synthetic construct
  REGION 1..95: note = AA sequence of anti-defense homologs identified (more details in the specs)
MDFGDALRALKAGAKVARQGWNGKGMWIALTPGSAFEAAHAKCGHAAAKRAAELQPDDEIELLPHIDMRAADGCMVVGWLASQTDMLAEDWVVVE

SEQ ID NO: 1067 - protein, 150 aa, synthetic construct
  REGION 1..150: note = AA sequence of anti-defense homologs identified (more details in the specs)
MKTYIGTKIIEAVPAIRKGVRVYEEGQPTPKSMDPVEEGYKVRYPDGYESFSPKAVFEAAYRPIDSMNFGLAIEAMKKGKKCRRAGWNGKNQHIELASAISYTSPAGTIVNAEHAAIGNKAIAFCGTSGVQMGWLASQADMLADDWEIVE

SEQ ID NO: 1068 - protein, 125 aa, synthetic construct
  REGION 1..125: note = AA sequence of anti-defense homologs identified (more details in the specs)
MGMRGKGADGDTVPEDQEVVGPATSDLDFGDALRALKRGERVCRAGWNGKGMWLSLSGPPRGLEVTAERFWSANNAEFARRSGGAAVVLPAITMKTATGEILMGWLASQTDMLAEDWMVLSADAA

SEQ ID NO: 1069 - protein, 164 aa, synthetic construct
  REGION 1..164: note = AA sequence of anti-defense homologs identified (more details in the specs)
MQQYIGTKIINAKPMTRLAYNQFRGWELPASENGTDEGFLVEYVDGGKANTAEYAGYVSWSPEDVFERAYRPAAGMTFGQAIEAMKLGQCVARAGWNGKGVFLYLIKGSDLQSGLKYGFGELIGEPEFVSTICMKTADNKLVAGWLASQTDMLAEDWYIVGEPA

SEQ ID NO: 1070 - protein, 173 aa, synthetic construct
  REGION 1..173: note = AA sequence of anti-defense homologs identified (more details in the specs)
MSKKLIELSMVAFIGTKSVLATPMTRGEYCDYRGWKIPDDEDPNEPVYLVEYTDGGKANDERHNGYITMSPKEVFDNAYRPNGSLNFGDAIRALKEGKKVARSGWNGKGMWLILTHGRVVENLEPNSFYEKCGFEAPVTICSHIDMKAADGSMVVGWLASQTDMLADDWAIVE

SEQ ID NO: 1071 - protein, 160 aa, synthetic construct
  REGION 1..160: note = AA sequence of anti-defense homologs identified (more details in the specs)
MAKYVKKPVVIEAYQTDKEMIIHTLEGDMKASVGDYIITGVHGEQYPCKPDIFRKTYEPFETKAETNLTFGEMLEYLKQGRKCYRRGWNGKEQYIVLGTAISYVNPDGYAVNTNHTTMGSAAIVFVGTQGEQVGWLASQADILSNDWAIRPDDCEYNCCG

SEQ ID NO: 1072 - protein, 181 aa, synthetic construct
  REGION 1..181: note = AA sequence of anti-defense homologs identified (more details in the specs)
MTQQNRITKDFLESEITNVEYQRLSGTITHCTITVKNGFTFTGESACVDPNNYDQMIGEKIAYDNAFEKMWMPYGFALKQKLGEEVQEVGESMTFGQAIEALKLGEKVARKGWNGKGMFLYYVPAASYPAQRNEKGTMLGVFPNDMVPYCAYIAMKTAQDNVVPWLASQSDVLAEDWILVK

SEQ ID NO: 1073 - protein, 140 aa, synthetic construct
  REGION 1..140: note = AA sequence of anti-defense homologs identified (more details in the specs)
MTKKYEVVDIAELKEKIEQLATDLDTTNVAVSRLIDDNAKSNQSLAQKVIESAATKTENMNFGEALEAVKNGKKIARKGWNGKGQYVFLIEGMELTEFIVKNKLGDFATGVLAIKTSNGITQVGWLASQTDMLASDWYIV

SEQ ID NO: 1074 - protein, 164 aa, synthetic construct
  REGION 1..164: note = AA sequence of anti-defense homologs identified (more details in the specs)
MPWSFDYKGYGISHENDDCYLIPTLEGTMKMTREDLLITGVKGEIYPCKRDIFEVTYEPADPKTAIGLNFGEAIAALKAGKKVARQGWNGKGMWLVLMPGLFLPPFNSQEPGAKVNDRTAKHISKDTPLDCQPYIVMWTALKQWQPGWLASQADMLAEDWVVVE

SEQ ID NO: 1075 - protein, 84 aa, synthetic construct
  REGION 1..84: note = AA sequence of anti-defense homologs identified (more details in the specs)
MNFGQAIEALKAGQMVQRQGWNGKGMHIYLEQGRHLPLSAGIEKGTTRIYDPVICMYTAQGTHQPGWLASQADILAEDWQTVDG

SEQ ID NO: 1076 - protein, 175 aa, synthetic construct
  REGION 1..175: note = AA sequence of anti-defense homologs identified (more details in the specs)
MQTFIGTKLIKATPMTRLEYNEYRGWTLPENENGADAGFLVEYLDGGQANDSRHVGYISWSPEAVFERAYRPTNGMTFGLAIEALKAGKKVARAGWNGKGMWLRLLDPYAPHPDMLAGRCDGVRTNPYFKAADNNTEAKGTMLSWIGMKTADNMFVPWLASQTDMLSEDWAVVEG

SEQ ID NO: 1077 - protein, 180 aa, synthetic construct
  REGION 1..180: note = AA sequence of anti-defense homologs identified (more details in the specs)
MGRFTKRPVTVEAVQFNKIGDHPAVKAGFGTGFCIEGRQGFVGVQPGDWIITEMNGAGFYPCKPDVFEATYVPAEDRDPAAMSFGDALRALKAGERVCRAGWNGKGMWLSLSGPPRGLEVVAERFWSANNAHFARRSGGTATVLPAITMKTATGEILMGWLASQTDMLAEDWMVLPADAA

SEQ ID NO: 1078 - protein, 101 aa, synthetic construct
  REGION 1..101: note = AA sequence of anti-defense homologs identified (more details in the specs)
MSYSNNSEENLSFGQAIEALEDGQRVARSGWNGKGMWLRLVKTGSYDVACGCVYPNGTHEEAQDVISLSPWIGMKTADSKFLPWLASQSDMLAKDWCVVSG

SEQ ID NO: 1079 - protein, 156 aa, synthetic construct
  REGION 1..156: note = AA sequence of anti-defense homologs identified (more details in the specs)
MTRDYYGTKRVTAWRSDWPDKGAGESQSGEGYKVKYEDGYTSWSPKAVFEAAYQPVDAMSFGHAIVALKAGHRVCRAGWNGKNMWLVLVPGSNGLTVDEGRPLAKAGLDVGTTFNYLPHIDMWTAQGDLVPWLSSQTDMLADDWQIVEAEVGSEAA

SEQ ID NO: 1080 - protein, 162 aa, synthetic construct
  REGION 1..162: note = AA sequence of anti-defense homologs identified (more details in the specs)
MNFDKAFKLMKDGLGIKLPSWAGYWFWDNEKETIIMHCKDGKKVDIRETQVVEYTLQNILSDEWIVADAGSTPVLGGTATFNFGEAIKYLKRGLKVARSGWNGKGMHLKLVPNGYYDVGLSIVEEPCEGLLPWIGMKTADNKFVPWLASQTDILAEDYTFVD

SEQ ID NO: 1081 - protein, 152 aa, synthetic construct
  REGION 1..152: note = AA sequence of anti-defense homologs identified (more details in the specs)
MKKYIGTKMLQATPMSIGDYNKYRGWTIPSNENPNDEGYLVEYEDGYQSWSPKEVFEKAYKECNGMVFGIAVELLKNGFKVARAGWNGKGMFIYYVPGARYEACTDIGASIADEENKVAYEPYLAIKNVKGTVSTWVPSINDCLAEDWNIVD

SEQ ID NO: 1082 - protein, 221 aa, synthetic construct
  REGION 1..221: note = AA sequence of anti-defense homologs identified (more details in the specs)
MDFGEALKALKAGACVAREGWNGKGMWIALTPGSAFEARHAKCGHAAAKRAVELHHPDAEIELLPHIDMRAADGSMVVGWLASQTDMLAEDWAVVGGSGALPAGVDLIADERADQIENHGWTPGHDDTHRRGELLWAAGCYVQEAASAAETGRGDCPVPGWPPEQWPWEKDYWNPRDDQRRNLAKAGALIAAEIDRLNRAALSAASTSDASAGPTPSQSEG

SEQ ID NO: 1083 - protein, 100 aa, synthetic construct
  REGION 1..100: note = AA sequence of anti-defense homologs identified (more details in the specs)
MNFGEALKQVKLGYRAARGSWNGKGMFVYLEHGSAPTSFHQLAERGTINGVSSLLFEVGHEGTTVRMPHLSLKAADGSRVTGWLASQTDLLAEDWVVYPG

SEQ ID NO: 1084 - protein, 174 aa, synthetic construct
  REGION 1..174: note = AA sequence of anti-defense homologs identified (more details in the specs)
MTKHIGVKLINAFPMTRHEYNAFRGWQLPTDENGADEGYLVEYLDGGKPNTDRFDGYVSWSPKEVFEKAYRPVSGLSFGLAIEALKKGKKVARAGWNGKGMWLAYVKPHSEAVHTGNTPCFCSRVFELPEGTQGDPKRAPEQLPYIAMKTADDKLVPWLASQTDVLAEDWNIVE

SEQ ID NO: 1085 - protein, 173 aa, synthetic construct
  REGION 1..173: note = AA sequence of anti-defense homologs identified (more details in the specs)
MTQHIGVKLINAFPMTRQAYNDFRGWQLPADENGSDDGYLVEYLDGGKPNTDRFDGYVSWSPKEVFEKAYRPVSGLSFGIAIEALRQGKKVARAGWNGKGMWLAYVKPYTEAVHTGSTPCFCSRVFELPEGAQGDPKRAPEQLPYIAMKTADEKLVPWLASQTDVLAEDWQIV

SEQ ID NO: 1086 - protein, 146 aa, synthetic construct
  REGION 1..146: note = AA sequence of anti-defense homologs identified (more details in the specs)
MNFGQALQALKAGYKVARIGWNGKGMFLILISGTKDVEPCEGTPYADLAVSPQGIVTINAHIDMKTATGEMQPGWLASQTDMLAEDWTIVGNETVVNSVGEYELPIGQIVKVDGFPFELREPVRALSSQHVLDVLRADKNIGIQAV

SEQ ID NO: 1087 - protein, 193 aa, synthetic construct
  REGION 1..193: note = AA sequence of anti-defense homologs identified (more details in the specs)
MDFGEALKAMKCGKRVRRSGWNGKGIFISIIFGEAYEDASRNKYMTHDYICIDTTGLKTDNEYSPKDRVPWVASQTDMLADDWKLVETQAEQTKRVIKRMRDSSRKAQKKLITNSTINVKINIDDDSLKTAVKKIDEHLSMSYRPVSTVYLKLDDAEHVRGMAIPFKTSYPDQIKEVQDVLQQNIDGGLISIN

SEQ ID NO: 1088 - protein, 98 aa, synthetic construct
  REGION 1..98: note = AA sequence of anti-defense homologs identified (more details in the specs)
MMNFGEALGSMKEGKKVARAGWNGKSQFVVVMPALYLPPHSTQEPGAKVNDRTAKHIGVDTPLDSQPYCALFNAQGKWQPGWVPSQGDLFAEDWVIVE

SEQ ID NO: 1089 - protein, 185 aa, synthetic construct
  REGION 1..185: note = AA sequence of anti-defense homologs identified (more details in the specs)
MENRVTKEHLESIIVDKKFHRLTETLTVCVLTLRNGFTVTGESACVDPASYNQEIGENIAYENAFEKLWQLEGYMLKTKLYDEKSAHYPEDIKNQTPFNFGYALNLLKKGKKVSRAGWNGKGMFLFIVKGGAITQAVAEHYGNSERPETNLPVLDAIYMKTADNKLVPWLASQTDVLAEDWNVID

SEQ ID NO: 1090 - protein, 162 aa, synthetic construct
  REGION 1..162: note = AA sequence of anti-defense homologs identified (more details in the specs)
MQKYIGTKEIKSMPMSRGEYNKLRGWEVPTDENPNDEGYLIEYADSKKNHPNFDGYISWSPKNIFEAAYQNISDGFDFGSAIRFLKQGKKVARKGWNGKGMFLFLVKGSKFIANREPLLSIFGEGEEIDYCPHIDMKTADDKVVPWLASQTDVLATDWVLVE

SEQ ID NO: 1091 - protein, 237 aa, synthetic construct
  REGION 1..237: note = AA sequence of anti-defense homologs identified (more details in the specs)
MKKYIGTKSVEAVPMELGEYINKGGRNPYKEGTHKDDEQGYLVKYEDGYESWSPKDVFEKAYKPADTFLDRLYIEDTELKEKYNKCNAFVDSDKFREIIKEDYPAFLLYLQREAMGSYLGTLHNRIEYANGAKLKPDTKYNFGEAIQALKFGLAIRRSGWNGKNLMVFKQVPAYIEGSIIPKMQSLPQSAKDLIGKGNNFIAYTSQCLIYNRGTGRADSWVPSVSDVFAEDWELVMG

SEQ ID NO: 1092 - protein, 162 aa, synthetic construct
  REGION 1..162: note = AA sequence of anti-defense homologs identified (more details in the specs)
MQKYIGVKEIKAMPMNRGEYNKLRGWEVPMDENSNDEGYLIEYADSKKNHPNFDGYISWSPKNLFEAAYQNISDGFDFGSVVHFLKQGKKVSRKGWNDKGMFLFLVKGSKFIANREPLLSIFGNGVEIDYCPHIDMKTADDKIVPWLASQTDVLATDWVLVE

SEQ ID NO: 1093 - protein, 87 aa, synthetic construct
  REGION 1..87: note = AA sequence of anti-defense homologs identified (more details in the specs)
MDFGSALVALKDGKRVSRAGWNGKGMFLFLVPGSHFKVNRPPLLGIYPEGTGIDYRPHIDMKTAQGDVVPWVASQSDLLCEDWGIVE

SEQ ID NO: 1094 - protein, 159 aa, synthetic construct
  REGION 1..159: note = AA sequence of anti-defense homologs identified (more details in the specs)
MTQHIGVKLINAFPMTRQAYNDFRGWQLPAGENGEDEGYLVEYLDGGKPNTDRFDGYVSWSPKEVFEKAYRPVSGLSFGLAMEALKQGKSLQRAGWNGKDQFVYLVKGEKLASALGYGFGEYVGEPTFNDTLVLKNSQNRLATWVPSIGDLMAEDWQII

SEQ ID NO: 1095 - protein, 159 aa, synthetic construct
  REGION 1..159: note = AA sequence of anti-defense homologs identified (more details in the specs)
MTQHIGVKLINAFPMTRQAYNDFRGWQLPAGENGEDEGYLVEYLDGGKPNTDRFDGYVSWSPKEVFEKAYRPVSGLSFGLAMEALKQGKSLQRAGWNGKDQFVYLVKGEKLASALGYGFGEYVGEPTFNDTLVLKNSQNRLATWVPSIGDMMAEDWQII

SEQ ID NO: 1096 - protein, 89 aa, synthetic construct
  REGION 1..89: note = AA sequence of anti-defense homologs identified (more details in the specs)
MNFGQAIEAVRAGEKISRKGWNGKNMFVVYQKGYPDGIPCNKQTAEALGINEGDLFKVRPYLQLRCADGTHAMWSPSTSDTLAEDWVVL

SEQ ID NO: 1097 - protein, 87 aa, synthetic construct
  REGION 1..87: note = AA sequence of anti-defense homologs identified (more details in the specs)
MSFGQAIVALVQGKNVAREGWNGKNMFLYLIEGNKLSKGLGYGYGEYVGVEPSFVDTIAMKTAQNTIVVGWLASQTDMLANDWVILN

SEQ ID NO: 1098 - protein, 90 aa, synthetic construct
  REGION 1..90: note = AA sequence of anti-defense homologs identified (more details in the specs)
MNFGKALELMKSGNKLSRKGWNGKNMFAVYQKGYPDGIPCNKQTAEAWGLNEGDLFKVRPYLQLRCADGTHAMWVPSVSDILAEDWMIVE

SEQ ID NO: 1099 - protein, 75 aa, synthetic construct
  REGION 1..75: note = AA sequence of anti-defense homologs identified (more details in the specs)
MMDFTKALELIKIGDKLARIDWRGTGMYVTVCNTPDFQPFVYIKTSEGTTVPWLPSQTDLFAKDWEIFKDGWKRI

SEQ ID NO: 1100 - protein, 139 aa, synthetic construct
  REGION 1..139: note = AA sequence of anti-defense homologs identified (more details in the specs)
MAVIIHSKYGYEPPEWVQADARLDRWYKDKKRRASKHGAFSLDKNKEEAIMNFGEVLEELKRGNCVARKGWNGKGIFIKLKKGESLNTPNNRFNEVMTHDFIYIDTTGLRTNNPNAPMDRVPWLASQTDMLADDWVVVE

SEQ ID NO: 1101 - protein, 143 aa, synthetic construct
  REGION 1..143: note = AA sequence of anti-defense homologs identified (more details in the specs)
VQTFIGTKIIKAEPRDKNYGPPEHHGEPGYTVVYPDGYTSWSPKAAFEEAYRPSDGLPFGLAVEALKKGRRVARAGWNGSGMFLFLVPGSTFKVNRAPLLGIYPEGTEINYHSHIDMKTAQDTVVPWLASQTDVLADDWQIVD

SEQ ID NO: 1102 - protein, 114 aa, synthetic construct
  REGION 1..114: note = AA sequence of anti-defense homologs identified (more details in the specs)
MDFGDALRALKQGARVARAGWNGKGMWLKLAPGSVIGARDAKCGHATAHRAEELEHPEGEIEVLPHIDMRAADGTIVVGWLASQTDMLADDWRIVGDTVQPDAFAAPFDSARTA

SEQ ID NO: 1103 - protein, 188 aa, synthetic construct
  REGION 1..188: note = AA sequence of anti-defense homologs identified (more details in the specs)
MKFRKKPVVIEATQWFQHGDHPAVKREILSQWATEKVGPETHGLIETLEGDHMVSPGDWVITGVAGEHYPCKPEIFAATYEPANRKFALSFSEALSALKAGAAVAREGWNGKGMWIALTPGSAFEAKYAKCGHAAAKRASEILPDEEIELLPHIDMRAADGSMVIGWLASQTDMLAEDWMIVAVGEGQ

SEQ ID NO: 1104 - protein, 148 aa, synthetic construct
  REGION 1..148: note = AA sequence of anti-defense homologs identified (more details in the specs)
MTKDYFSTKRVTAWPADRDGQVGMAIKYADGYQSWCPKDVFDREYQPITAMSFGAALVALKRGGQVARAGWNGKGMHISLVPGSSEYLAPDRSRLIGGVSENHFALGDSGTVTRMPHLAMRAADGSIVTGWLASQTDMLAEDWMIVGE

SEQ ID NO: 1105 - protein, 86 aa, synthetic construct
  REGION 1..86: note = AA sequence of anti-defense homologs identified (more details in the specs)
MTTFSEALEAVKSGKRITRTGWNGKGMFLYLIKGRDLQVGLEYGYGEYVGEPSFVDSICMKTTDNKLVIGWLASQTDLLANDWIIL

SEQ ID NO: 1106 - protein, 85 aa, synthetic construct
  REGION 1..85: note = AA sequence of anti-defense homologs identified (more details in the specs)
MNFVQAIVALKEGKQVARQGWNGKGQFVYLIKGAELQRGLKYGYGEYEGEPTIVDVLAIKTTSNHIQIGWLASQSDMLAEDWEIV

SEQ ID NO: 1107 - protein, 142 aa, synthetic construct
  REGION 1..142: note = AA sequence of anti-defense homologs identified (more details in the specs)
MKQYIGTKIIQAEPAIRKGGKVYALTDPIPKTMEPSEDGYKVIYPDGYVSWSPKDAFEQAYRPTNGMTFGLALEALKKRMKVARSGWNGKDQYVTLIPAGNAMFQGHDMQDCFGLKNAQGNMQPGWVPSVGDCLAEDWNIVQ

SEQ ID NO: 1108 - protein, 185 aa, synthetic construct
  REGION 1..185: note = AA sequence of anti-defense homologs identified (more details in the specs)
LSFFYYNERVIKMSKWRKKSVVIEAFKWTGDQNQSEDPVWINEAYRRGDVRYDGVGTNDMEMFISTLEGVMTARPGDYIIQGIEGEIYPCKASIFEKTYESAGEIMSFGAAVEALKAGKRVARAGWNGRVMWLTLVPACRYNPSDVNSLGLEKLPWIGMKTADNKFVPWLASQTDVLAEDWQVIE

SEQ ID NO: 1109 - protein, 81 aa, synthetic construct
  REGION 1..81: note = AA sequence of anti-defense homologs identified (more details in the specs)
MKFGQAIEALKEGKKAARKGWNGKGIFLELQVPDTHSKMTHPYIYIDTTGLQTDNENAPKSRVPWLASQTDMLSEDWEVVE

SEQ ID NO: 1110 - protein, 86 aa, synthetic construct
  REGION 1..86: note = AA sequence of anti-defense homologs identified (more details in the specs)
MNFGEALECLKAGKRVSRTGWNGKNQFIFLIKGTDLQGTLGYGYGEYLGEPTIVDVLAIKTTSNQIQIGWIASQTDMLSEDWEVVE

SEQ ID NO: 1111 - protein, 86 aa, synthetic construct
  REGION 1..86: note = AA sequence of anti-defense homologs identified (more details in the specs)
MTFGQAIEAVKKGNKIARKGWNGIGMFVFYVPAASYPPSTDVMKESFGGENVPYRAYLALKTAQNDVATWSPSTSDALAEDWEVVG

SEQ ID NO: 1112 - protein, 87 aa, synthetic construct
  REGION 1..87: note = AA sequence of anti-defense homologs identified (more details in the specs)
MMKFGQAIEAVKKGNKIARKGWNGKCMFVYYVPAASYPPATDIMKEAFGGENVPYRAYLALKTAQNDVATWSPSTSDVLAEDWMVVE

SEQ ID NO: 1113 - protein, 91 aa, synthetic construct
  REGION 1..91: note = AA sequence of anti-defense homologs identified (more details in the specs)
MDLTIGDFGWAWHRLKEGERVFRSGWNGKGMFLYLVNGNDFSTAFRYGYGEYAGEPRFEDSIAIKTAQNTISVGWKPTNLDMFANDWEVVE

SEQ ID NO: 1114 - protein, 89 aa, synthetic construct
  REGION 1..89: note = AA sequence of anti-defense homologs identified (more details in the specs)
MNFGQAIEAVRAGEKVSRKGWNGKNMFVVYQKGYPDGIPCNKQTAEALGINEGDLFKVRPYLQLRCADGTHAMWSPSTSDALAEDWVVL

SEQ ID NO: 1115 - protein, 83 aa, synthetic construct
  REGION 1..83: note = AA sequence of anti-defense homologs identified (more details in the specs)
MTFGQALEALKQGKTVARKGWNDEGMWLRLVKQGEFDISFEVVGGNKCKGLLPWIGMKTADDTFVPWLASQTDMLAEDWEVVE

SEQ ID NO: 1116 - protein, 98 aa, synthetic construct
  REGION 1..98: note = AA sequence of anti-defense homologs identified (more details in the specs)
MFNFGQAIEALKAGKKVARAGWNGKGMWVVLMPSLQLPPHSTQKPGPKVNDRTAKHIGVDTPLDSQPYIAMWTATKQWQPGWLASQADMLAEDWEVVE

SEQ ID NO: 1117 - protein, 139 aa, synthetic construct
  REGION 1..139: note = AA sequence of anti-defense homologs identified (more details in the specs)
MAKMIRSKYGYEPPEWVQADARLDKWCKDKKRRANKHGAFSLDKNKEEAIMNFGEALEELKRGNCVARKGWNGKGIFIKLKKGESLNTPNNRFNEVMTHDFIYIDTTGLRTNNPNAPMDRVPWLASQTDMLADDWVVVE

SEQ ID NO: 1118 - protein, 91 aa, synthetic construct
  REGION 1..91: note = AA sequence of anti-defense homologs identified (more details in the specs)
METFKDMPFGDAIELLKKGKKVCRAGWNGKGMWLFHVSGQEMARRTGYGFGQYLYEPNWNGFIVMKTVDNNLVPWTASQTDVLSNDWQIVD

SEQ ID NO: 1119 - protein, 88 aa, synthetic construct
  REGION 1..88: note = AA sequence of anti-defense homologs identified (more details in the specs)
MDFSDALAAVKRGHRIARKGWNGKGMYVFLVPGSVFKVNREPLLSMLGEGTQVTYHAHLVMRTADGTIVPWLASQSDLLDEDWELVTP

SEQ ID NO: 1120 - protein, 86 aa, synthetic construct
  REGION 1..86: note = AA sequence of anti-defense homologs identified (more details in the specs)
MNFGQAIEAVKKGNKIARKGWNGKGMFVYYVPAASYPPATSIMKEAFGGENVPYRAYLALKTAQNDVATWSPSTSDALAEDWEVVK

SEQ ID NO: 1121 - protein, 120 aa, synthetic construct
  REGION 1..120: note = AA sequence of anti-defense homologs identified (more details in the specs)
MDNNTSTVGTGRSLVDFGEAVKALKEGKRIQRRGWNGKGMFVFMQVPSSVPAEFVPKMSSLPETVKEAFSRRFDSMSKDLKGDADIRYQNQLAMVYPDNNIYGWLASPSDLLSEDWMILD

SEQ ID NO: 1122 - protein, 87 aa, synthetic construct
  REGION 1..87: note = AA sequence of anti-defense homologs identified (more details in the specs)
MDFGEAIKALKTGKRLARKGWNGKGIFIALMPGNSFEDCGGHKCMTHDYIYIDTTGLKTTNDSAPLDRVPWLASQTDLLSDDWEVVD

SEQ ID NO: 1123 - protein, 87 aa, synthetic construct
  REGION 1..87: note = AA sequence of anti-defense homologs identified (more details in the specs)
MDFGEAIKALKTGKRLARKGWNGKGIFIALMPGNSFEDCGGHKCMTHDYIYIDTTGLKTTNDSAPLDRVPWLASQTDMLADDWEVVK

SEQ ID NO: 1124 - protein, 173 aa, synthetic construct
  REGION 1..173: note = AA sequence of anti-defense homologs identified (more details in the specs)
MTQHIGVKLINAFPMTRQAYNDFRGWQLPAGENGEDEGYLVEYLDGGKPNTDRFDGYVSWSPKEVFEKAYRPVSGLSFGLAIEALKLGNKVARAGWNGKGMWLAYVKPYTEAVHTGSTPCFCSRVFELPEGTHGESKRSPKQLPYIAMKTADDKLVPWLASQTDVLAEDWQII

SEQ ID NO: 1125 - protein, 90 aa, synthetic construct
  REGION 1..90: note = AA sequence of anti-defense homologs identified (more details in the specs)
MNFGQALEAVKAGAKIYRQGWNGKGQFVIKAGGYTVNEPRPGSDYAKAGIAGEFTIQPHLDLKNAQGQMQPGWVPSQGDLFAEDWIAESP

SEQ ID NO: 1126 - protein, 94 aa, synthetic construct
  REGION 1..94: note = AA sequence of anti-defense homologs identified (more details in the specs)
MDFGEALEALHHGKKVAREGWNGKGMFIYLESGTLITPDKIRNLTLAKSTPDSQKYININPHIDMKSADGSIVVGWLASQTDMLAYDWEVVGRD

SEQ ID NO: 1127 - protein, 109 aa, synthetic construct
  REGION 1..109: note = AA sequence of anti-defense homologs identified (more details in the specs)
  SITE 102: note = misc_feature - Xaa can be any naturally occurring amino acid
MAAMIHSKYGYDPPEWVQADARLDKWCKDKKRRANKHGAFSLDKNKEEAIMNFGEALEELKRGNCVARKGWNGKGIFIKLKKGESLNTPNNRFNEVMTHDFXERQRHLH

SEQ ID NO: 1128 - protein, 89 aa, synthetic construct
  REGION 1..89: note = AA sequence of anti-defense homologs identified (more details in the specs)
MNFGEALEELKRGNCVARKGWNGKGIFIKLKKGESLNTPNNRFNEVMTHDFIYIDTTGLRTNNPNAPMDRVPWLASQTDMLADDWIVVE

SEQ ID NO: 1129 - protein, 256 aa, synthetic construct
  REGION 1..256: note = AA sequence of anti-defense homologs identified (more details in the specs)
MSNDRISSQDAADEAQIASKGLNAPRVTPADIEAAIVSESYFTAADGVRAASESKPGASLLPEYVTFNKSPLSCVTICVLVLRNGTKIVGVNTGPVSSDNFCADLGRQYARQHAVDQVWPLLGYALRDQLAAVRQLETRAYADGTTATGVPPLPVASPAKRDMKFGEALDHLISGGRIQRAGWNGKGMFLWLNLGSHDEHEQAAAIGGVPRALFMLGDDGTVTRMPNINMRAADGSTVTGWLASQTDMLACDWRVA

SEQ ID NO: 1130 - protein, 90 aa, synthetic construct
  REGION 1..90: note = AA sequence of anti-defense homologs identified (more details in the specs)
MKFGQALDLMKQGEKAFRLGWNGKGMFTVYQKGYPDGIPCNKQTASAWGLNEGDLFKVQPYLQIRTAQGDHAMWVPSTGDILAEDWEIIR

SEQ ID NO: 1131 - protein, 170 aa, synthetic construct
  REGION 1..170: note = AA sequence of anti-defense homologs identified (more details in the specs)
METFIGTKLIKAVAMTRLAYNDYRGWTLPADEDGNDPGFLVEYIDGGRSNHPDHEGYISWSPADVFEKSYRLHDQLTFGEALEALKAGMRIARAGWNGKDMWVALSGPLEGRTIAFENFWSKPCSEFARYNGGSATVLPCINMKTADGKILMGWLASQTDMLADDWVIIP

SEQ ID NO: 1132 - protein, 97 aa, synthetic construct
  REGION 1..97: note = AA sequence of anti-defense homologs identified (more details in the specs)
MTQVLNEGLSFGDAIKALKQGRRVARAGWNGKGMWLVLDPGSTVGEVRPGSAYHKAGVTGSFTINPHIDMKTATGEMQPGWLASQTDMLADDWVILE

SEQ ID NO: 1133 - protein, 153 aa, synthetic construct
  REGION 1..153: note = AA sequence of anti-defense homologs identified (more details in the specs)
MNFGDAIKELKLGKRLQRTGWNGKGLFIYLVPAASYPAQTGAAKAHFGEGAMVPYAAYLALKNVDETVSTWAPSINDTLAEDWQVVGCTVPPHQQRVLDEKQELDIRITRLDEFILRNALFRELDPEEQARMRRQLDVMRELSVILGERISAF

SEQ ID NO: 1134 - protein, 139 aa, synthetic construct
  REGION 1..139: note = AA sequence of anti-defense homologs identified (more details in the specs)
MVVMIHSKYGYEPPEWVQADARLDRWYKDKKRRAKQHGAFRLDKNNEEAIMNFGEAIKALKLGKRVARKGWNGKGIFIKLKKGEPLNTPNNRFNEVMTHDFIYIDTTGLRTNNPNAPMDRVPWLASQTDMLADDWVVVE

SEQ ID NO: 1135 - protein, 91 aa, synthetic construct
  REGION 1..91: note = AA sequence of anti-defense homologs identified (more details in the specs)
MYLLSDEFREALLSKKRLARKGWNGKKMFVVHQSAYPNGIPINKNTAEATGLSEGTVCKFLPYVMMKTADNSFVPWLASQTDLLANDWEVV

SEQ ID NO: 1136 - protein, 153 aa, synthetic construct
  REGION 1..153: note = AA sequence of anti-defense homologs identified (more details in the specs)
MNFGDAIKELKLGKRLQRTGWNGKGLFIYLVPAASYPAQTGAAKAHFGEGAMVPYAAYLALKNVDETVSTWAPSINDTLAEDWQVVGCTVPPHQQRVLDEKQDTDIRITRLDEFILRNALFRELDPEEQARMRRQLDVMRELSVILGERISAF

SEQ ID NO: 1137 - protein, 89 aa, synthetic construct
  REGION 1..89: note = AA sequence of anti-defense homologs identified (more details in the specs)
MTFGTAIDQLKQGNRVARKGWNGKGIFIKLKKGDSLNTPNNRSDEVMTHDFIYIDTTGLQTNNPNAPRDRVPWLASQTDMLAVDWYVIK

SEQ ID NO: 1138 - protein, 88 aa, synthetic construct
  REGION 1..88: note = AA sequence of anti-defense homologs identified (more details in the specs)
MFEKLNFGDAIKALKAGKSVARTGWNGKGMFLFLVAGQEIAKGTKFGFGQYEGEPDWNDFIAMKTADNKLVPWLASQTDVLAEDWQIV

SEQ ID NO: 1139 - protein, 91 aa, synthetic construct
  REGION 1..91: note = AA sequence of anti-defense homologs identified (more details in the specs)
MDLTIGDFGWALHRLKEGERVFRSGWNGKGMFLYLVNGNDFSTAFRYGYGEYAGEPRFEDSIAIKTAQNTISVGWKPTNLDMFANDWEVVE

SEQ ID NO: 1140 - protein, 91 aa, synthetic construct
  REGION 1..91: note = AA sequence of anti-defense homologs identified (more details in the specs)
IMNFGKALELMKSGNKLSRKGWNGKNMFAVYQKGYPDGIPCNKQTAEAWGLNEGDLFKVRPYLQLRCADGTHAMWVPSVSDILAEDWMIVE

SEQ ID NO: 1141 - protein, 118 aa, synthetic construct
  REGION 1..118: note = AA sequence of anti-defense homologs identified (more details in the specs)
MNFGQALDALKEGKRVSRSGWNGKGMFIYLQSGSFDHELLGFQPGAKPMVGHPSTIDGVSLGLFEAGDKGTVTRLPNLNMRSATGATVTGWLASQTDMLAEDWDVVPPAVQAGAAAGV

SEQ ID NO: 1142 - protein, 89 aa, synthetic construct
  REGION 1..89: note = AA sequence of anti-defense homologs identified (more details in the specs)
MNFGSALELLKQGSQLAREGWNGKNMFVVYQKGYPDGIPCNKQTAEAWGLNEGDLFKVRPYLQLRCADGTHAMWVPSISDILSDDWVEL

SEQ ID NO: 1143 - protein, 153 aa, synthetic construct
  REGION 1..153: note = AA sequence of anti-defense homologs identified (more details in the specs)
MKRYIGTKVINARPMNRADYNTHRSWPLAADENGADEGYLVECLDGGAPNHPGHAGYISWSPKAQFENAYTATEGMTFGQAIYALRIGFRVAREGWNGKSMWLHLVKDWNGDVGGLPLGCELLPWIGMKTADDKFVPWLASQTDMLALDWGVV

SEQ ID NO: 1144 - protein, 113 aa, synthetic construct
  REGION 1..113: note = AA sequence of anti-defense homologs identified (more details in the specs)
MLTPIETALTFGQAVEALKEGKMIARAGWNGKGMFVFQRPADVLSSEILPNVKSLPQKVKDYFAENKNPTGEAYGITFTAYLCMKAADGSIVNGWLASQTDMLAEDWNIVENL

SEQ ID NO: 1145 - protein, 153 aa, synthetic construct
  REGION 1..153: note = AA sequence of anti-defense homologs identified (more details in the specs)
MNFGDAIKELKLGKRLQRTGWNGKGLFIYLVPAASYPAQTGAAKAHFGEGAMVPYAAYLALKNVDETVSTWAPSINDTLAEDWQVVGCTVPPHQQRVLDEKQELDIRITRLDEFILRNALFRQLDPEEQARLRRQLDVMRELSVILGERISAF

SEQ ID NO: 1146 - protein, 139 aa, synthetic construct
  REGION 1..139: note = AA sequence of anti-defense homologs identified (more details in the specs)
MAVMIHSKYGYEPPEWVQADSRLDKWCKDKKRRAKQHGAFSLDKNKEEAIMNFGEVLEELKRGNCVARKGWNGKGIFIKLKKGESLNTPNNRFNEVMTHDFIYIDTTGLRTNNPNAPMDRVPWSASQTDMLADDWVVVE

SEQ ID NO: 1147 - protein, 143 aa, synthetic construct
  REGION 1..143: note = AA sequence of anti-defense homologs identified (more details in the specs)
MFDIEKMRIVPMTLGKYFESRGWSVPYDLPKTTKGYKIENDAGLSCWMSYEEFRDKYKEYMGLSFSSALELLKQGCAVAREGWNGKGIFIVLQKPDANSKMTHPYIYIDTMELVTDSDLAPKDRVPWVASQTDLLAEDWVIVL

SEQ ID NO: 1148 - protein, 156 aa, synthetic construct
  REGION 1..156: note = AA sequence of anti-defense homologs identified (more details in the specs)
MTQHIGVKLINAFPMTRLAYNDFRGWQLPSDENGADEGYLVEYLDGGKPNTDRFDGYVSWSPKEVFEKAYRPVSGLSFGLAIEALKQGKKVARVGWNGKGMYLFIIQQNAWGFECDLDGVNGLVTLPCICMKTADDKLVPWLANQTDILAEDWQVV

SEQ ID NO: 1149 - protein, 155 aa, synthetic construct
  REGION 1..155: note = AA sequence of anti-defense homologs identified (more details in the specs)
MNFGQAIEKLKAGKPVARMGWNGKDQYVYMITGKELSKGLKYGYGEYEGEPRFTDVLAIKTTANQIQTGWLASQSDMLATDWFEVDQSEKKYNVVAIEEIPERVEAQFWFRLDHGKLGTWSKMGNTDKGQQWTDAQIKDYGLEGFEKIEVKPRAD

SEQ ID NO: 1150 - protein, 105 aa, synthetic construct
  REGION 1..105: note = AA sequence of anti-defense homologs identified (more details in the specs)
MYLRLSMTGAFLMLKGGQKMDFGQALTQVKLGKSIKRKGWNGKNQFVYLIKGRDLQKGLHYGFGEYLGEPTITDTLAIKTTSNQIQVGWLASQSDMLSNDWEVIE

SEQ ID NO: 1151 - protein, 90 aa, synthetic construct
  REGION 1..90: note = AA sequence of anti-defense homologs identified (more details in the specs)
MKFGQALDLMKQGEKAFRSGWNGKGMFAVYQKGYPEGIPCNKQTAEAWGMNEGDLFKVRPYLQLKTAQGDHAMWVPSISDILAEDWEIIK

SEQ ID NO: 1152 - protein, 168 aa, synthetic construct
  REGION 1..168: note = AA sequence of anti-defense homologs identified (more details in the specs)
MKFGEALEAVKSGAKIYREGWNGKGQFVIKAGGYTVSEPRPGSDYAKAGITGEFTIAPHLDLKNAQGIMQPGWVPSMGDLFADDWLATPVIHDHACINCFTGKGPCLGDCNVTDTNKSMALSFEDVVKPVIKWLNENANPHALVIIDVTNATLLIGEIGIRTEKYLKD

SEQ ID NO: 1153 - protein, 156 aa, synthetic construct
  REGION 1..156: note = AA sequence of anti-defense homologs identified (more details in the specs)
MTQHIGVKLINAFLMTRQAYNDFRGWQLPAGENGEDEGYLVEYLDGGKPNTDRFDGYVSWSPKEVFEKAYRPVSGLSFGLAIEALKLGNKVARAGWNGKGMYLFIIQQNAWGFECDLDGVNGLVTLPCICMKTADDKLVPWLASQTDVLSEDWQII

SEQ ID NO: 1154 - protein, 175 aa, synthetic construct
  REGION 1..175: note = AA sequence of anti-defense homologs identified (more details in the specs)
MSKLLAQSLCAYIGTKSVLATQMTRGEYNEYRGWQIPENEDPTEQGYLVEYVDGGKPNDERHAGYISWSPADVFERSYKPPKLNSNLTFGEALEHLKKGSRVARLGWNGKGMWLILTKGRVVENLEPNSFYEKSGFKAPVTICSHIDMKAADGSMVIGWLASQTDMLAEDWIVLS

SEQ ID NO: 1155 - protein, 110 aa, synthetic construct
  REGION 1..110: note = AA sequence of anti-defense homologs identified (more details in the specs)
MKRRAKQHGAFRLEKNKEEAIMNFGEVLEELKRGNCVARKGWNGKGIFIKLKKGESLNTPNNRFNEVMTHDFIYIDTTGLRTNNPNAPMDRVPWLASQTDMLADDWVVVE

SEQ ID NO: 1156 - protein, 173 aa, synthetic construct
  REGION 1..173: note = AA sequence of anti-defense homologs identified (more details in the specs)
MTKVKLPQYQSIKIVEAAEIAKIEGQTMLLSFRKHVAKVEVDQTYLDKHQPQVGGYFVRYENGYESYSPKEPFESGYLSVETTIHAARVGASFGIAIEMLKDGHRVARKGWNGKGMFLRMVSGKQYDVACGIARDLELAPWIGMKTADGKFVPWLASQTDMLAEDWVIVEMVP

SEQ ID NO: 1157 - protein, 85 aa, synthetic construct
  REGION 1..85: note = AA sequence of anti-defense homologs identified (more details in the specs)
MDFGDALKLMKQGSYVARKGWNGKNMYIGITYPDIDNRATKPYISMKTADNEIIPWLASQTDVLADDWFEVPYRNDMLLLSAQTY

SEQ ID NO: 1158 - protein, 89 aa, synthetic construct
  REGION 1..89: note = AA sequence of anti-defense homologs identified (more details in the specs)
VNFGEAIEAIKAGMPVCRSGWNGKGMFLVYVPGTPQVASKAGSPYRATGITKADIGPHIDMFTASGCFQPGWLASQADVLADDWQIFTK

SEQ ID NO: 1159 - protein, 87 aa, synthetic construct
  REGION 1..87: note = AA sequence of anti-defense homologs identified (more details in the specs)
MNFGQALEALKLGQKVSRDGWNGKGMFLFLVPGSIFKVNRPPLLGIYTEGTEIKYHAHVDMKTAQGDVVPWLCSQTDMLAEDWGVVP

SEQ ID NO: 1160 - protein, 174 aa, synthetic construct
  REGION 1..174: note = AA sequence of anti-defense homologs identified (more details in the specs)
MSEVYYGTKQIKAVPMNRQAYNDYRGWELPADEDGSDAGFLVEYVDGGASNHPDHEGYISWSPADVFERAYQSSGSMNFGHALQAVKEGHRVARAGWNGKGMFIVLMPRLELPPFNTQGTARKVNDRTAKWIGEETPLDCQPYLAMWTADKKWQPGWLASQADMLADDWLIVAD

SEQ ID NO: 1161 - protein, 141 aa, synthetic construct
  REGION 1..141: note = AA sequence of anti-defense homologs identified (more details in the specs)
MTFSEALEQLKLGKKLKRKNWNGKNQFIFLIDRDFLEDILRGGTDEKWGDRPWKENAFLNSLEVTEFNVTDLLAIKTTANQLQLGWLASQTDMLSDDWEVIDNSLKEVKTEDSAIGSDNAAASAINNPVKHAIHNSFMPGA

SEQ ID NO: 1162 - protein, 174 aa, synthetic construct
  REGION 1..174: note = AA sequence of anti-defense homologs identified (more details in the specs)
MTKHIGVKLINAFPMTRHEYNAFRGWQLPADENGADEGYLVEYLDGGKPNTDRFDGYVSWSPKEVFEKAYRPVSGLSFGLAIEALKKGKKAARAGWNGKGMWLAYVKPHSEAVHTGNTPCFCSRVFELPEGTQGDPKRAPEQLPYIAMKTADDKLVPWLASQTDVLAEDWNIVE

SEQ ID NO: 1163 - protein, 173 aa, synthetic construct
  REGION 1..173: note = AA sequence of anti-defense homologs identified (more details in the specs)
MTKVKLPQYQSIKIVEAAEIAKIEGQTMLLSFRKHVAKVEVDQTYLDKHQPQVGGYFVRYENGYESYSPKGPFESGYLSVETTIHAARVGASFGIAIEMLKDGHRVARKGWNGKGMFLRMVSGKQYDVACGIARDLELAPWIGMKTADGKFVPWLASQTDMLAEDWVIVEVAP

SEQ ID NO: 1164 - protein, 102 aa, synthetic construct
  REGION 1..102: note = AA sequence of anti-defense homologs identified (more details in the specs)
MTFSEALEQLKQGKKLKRKNWNGKNQFIFLIHGENIQAAYSAWMSDYWTDNDPDDDILSHFIDSGDISFPDFLAIKTTSNQIQLGWLASQTDMLSDDWEVVE

SEQ ID NO: 1165 - protein, 87 aa, synthetic construct
  REGION 1..87: note = AA sequence of anti-defense homologs identified (more details in the specs)
MFSFSDALNHLKSGKKVARSGWNGKGMFVFLVPGSTFKVNRAPLLGIYPEGTEINYCPHIDMKTADDKIVPWLASQTDVLADDWTLV

SEQ ID NO: 1166 - protein, 175 aa, synthetic construct
  REGION 1..175: note = AA sequence of anti-defense homologs identified (more details in the specs)
MSKLLARSLCAYIGTKSVLATQMTRGEYNEYRGWQIPENEDPTEQGYLVEYVDGGKPNDERHAGYISWSPADVFERSYKPPKLNSNLTFGEALEHLKKGEKVARLGWNGKGMWLILTKGRVVENLEPNSFYEKSGFKAPVTICSHIDMKAADGSMVIGWLASQTDMLAEDWMVLS

SEQ ID NO: 1167 - protein, 90 aa, synthetic construct
  REGION 1..90: note = AA sequence of anti-defense homologs identified (more details in the specs)
MNFGQAIEAVKNGEKIARRGWNGKNMFVVYQKGYPEGIPCNKQTAEAWGLNEGDLFKVRPYLQLRCADGTHAMWAPSTSDALAEDWEVVE

SEQ ID NO: 1168 - protein, 119 aa, synthetic construct
  REGION 1..119: note = AA sequence of anti-defense homologs identified (more details in the specs)
MGSFAGCQLCEACEKTMIDTGVIGLIFEEKIKSKAELNFGAALTFLKEGLRVARKGWNGKGMWLWQVDSWGGNIKSASPDPFVYLEASPFIAMKTTDDKLVPWLASQTDILAVDWEVVE

SEQ ID NO: 1169 - protein, 91 aa, synthetic construct
  REGION 1..91: note = AA sequence of anti-defense homologs identified (more details in the specs)
MKFGEALETVKSGAKIYREGWNGKGQFVIKAGGYTVSEPRPGSDYAKAGITGEFTIAPHLDLKNAQGSIQPGWVPSQGDLFADDWLAEPVA

SEQ ID NO: 1170 - protein, 156 aa, synthetic construct
  REGION 1..156: note = AA sequence of anti-defense homologs identified (more details in the specs)
MTQHIGVKLINAFPMTRQAYNDFRGWQLPAGENGEDEGYLVEYLDGGKPNTDRFDGYVSWSPKEVFEKAYRPVSGLSFGLAIEALKLGNKVARAGWNGKGMYLFIIQQNAWGFECDLDGVNGLVTLPCICMKTADDKLVPWLASQTDVLAEDWQII

SEQ ID NO: 1171 - protein, 224 aa, synthetic construct
  REGION 1..224: note = AA sequence of anti-defense homologs identified (more details in the specs)
MTQFRKKPVVIEAWPAHELIHAASRDWQALPKAVADAYEKGGWVFQFDGIYIPTLEGSMRAERTDMVIRGVQGEFYPCKPEIFAETYDRVEATAWRRNDALPPTDARHLAGIRNLEQVMNEKVTPPSPAEFTFGLGFGSALDHLKEGRRVARDGWNGKGMFVYLVPPASYAVQTGAAKAHFGEGSMVPYNAYFAIKNVNDTVSTWVPSVNDCLADDWYVLQEEG

SEQ ID NO: 1172 - protein, 159 aa, synthetic construct
  REGION 1..159: note = AA sequence of anti-defense homologs identified (more details in the specs)
MTQHIGVKLINAFPMTRQAYNDFRGWQLPAGENGEDEGYLVEYLDGGKPNTDRFDGYVSWSPKEVFERAYRPVSGLSFGLAMEALKQGKSLQRAGWNGKDQFVYLMKGEKLASALGYGFGEYVGEPTFNDTLVLKNSQNRLATWVPSIGDLMAEDWQII

SEQ ID NO: 1173 - protein, 94 aa, synthetic construct
  REGION 1..94: note = AA sequence of anti-defense homologs identified (more details in the specs)
MDFGEALVALKEGKRVAREGWNGKGTFLFLVAGSNFVVNREPLLAIMGEGTMVTYRPHIDMKDAEDKVVPWLASQTDRLAEDWCVVELGAGDAA

SEQ ID NO: 1174 - protein, 109 aa, synthetic construct
  REGION 1..109: note = AA sequence of anti-defense homologs identified (more details in the specs)
MTFSEALGQLKQGKRVARKNWNGKDQFVFLVKGEDVYGAYAARFDDYEHVDGFENSIITQLTCINADTAKITDLLAIKTTSNQIQLGWLASQTDMLSDDWEVIENEQCN

SEQ ID NO: 1175 - protein, 99 aa, synthetic construct
  REGION 1..99: note = AA sequence of anti-defense homologs identified (more details in the specs)
MDFGKALDALKEGKRVSRSGWNGKGMFLFLVAGSNFTVNREPLASIVGMGSEITYRPHIDMKDAEGKVVPWLASQTDMLAEDWDVVSLAVQADRVKVEV

SEQ ID NO: 1176 - protein, 86 aa, synthetic construct
  REGION 1..86: note = AA sequence of anti-defense homologs identified (more details in the specs)
MNFGKAIEALKQGYKVARKGWNGKNQYIQYIPSKILNKQLKHDEKYTFSDVLAIKTSNDVIQVGWLATQTDMLAQDWEILPAMAIN

SEQ ID NO: 1177 - protein, 85 aa, synthetic construct
  REGION 1..85: note = AA sequence of anti-defense homologs identified (more details in the specs)
MDFGSALELLKQGERVAREGWNGKDMFLYLIKGNELSKGLKYGYGEYVGEPSFVDTVAMKTAQNTIVVGWLASQSDMLANDWIEL

SEQ ID NO: 1178 - protein, 174 aa, synthetic construct
  REGION 1..174: note = AA sequence of anti-defense homologs identified (more details in the specs)
MQEFYGTKRVAALPMTRLAYNDYRGWQLPRDENGADDGYLVEYKHGGKGNHPDHVGYISWSPKAQFDAAHQPTSAMSFGHAIAALKEGYRVARSGWNGKGMFIYLQKGSYDVPPDGSVPHQVGGVPFPLFDDGDHGTTTRMPCMCMRAADGSIVTGWLASQTDILAEDWTILAD

SEQ ID NO: 1179 - protein, 146 aa, synthetic construct
  REGION 1..146: note = AA sequence of anti-defense homologs identified (more details in the specs)
MNFGQALQALKAGYKVARIGWNGKGMFLILISGTKDVEPCEGTPYADLAVSPQGIVTINAHIDMKTATGEMQPGWLASQTDMLAEDWTIVGNETVVNSVGEYELPIGQIVKVDGFPFELREPVRALSGQHVLDVLRADKNIGIQAV

SEQ ID NO: 1180 - protein, 145 aa, synthetic construct
  REGION 1..145: note = AA sequence of anti-defense homologs identified (more details in the specs)
MTQDYYGTKRVTAWPQERAPGPYGPREMQDGYAVKYEDGYTSWSPRATFEAAYQPVVAMSFGHAIVAMKAGHRVARAGWNGKGMFLFLVPGSVFQVNRPPLLGIYPEGTEIRYHAHIDMKTAQGYVVPWLASQADMLADDWTIIE

SEQ ID NO: 1181 - protein, 110 aa, synthetic construct
  REGION 1..110: note = AA sequence of anti-defense homologs identified (more details in the specs)
MSRYDETPGAPMCDTASDIKAKIEARQLSGGLGGCSQANMTFGDALRVLKLGARVGRFGWNGRGMWLALQRPDQSSKMTLPYIYMFTAQNQTVPWLASQTDIMSEDWYTL

SEQ ID NO: 1182 - protein, 85 aa, synthetic construct
  REGION 1..85: note = AA sequence of anti-defense homologs identified (more details in the specs)
MKFGEAVDLLNDGYKITRSGWNGKRMFLYLIKGSELAKGLKYGYGEYRGEPVFDNFIVMKTANNKIVPWLASQTDMLAEDWEIIK

SEQ ID NO: 1183 - protein, 155 aa, synthetic construct
  REGION 1..155: note = AA sequence of anti-defense homologs identified (more details in the specs)
MNYEVTYVENGQVIKKKVEDVINVMNSGISIEFLGAEGAVLIINNRDFMSAKEIVLCGKDEGVRMGSPDLGSREAVEVGMNFGQAIEALKDGKKVARNGWNGKGMWLKLIPSGNAMFKGYHMKDCIGMKTANNLMQPGWLASQIEMLAEDWEIVD

SEQ ID NO: 1184 - protein, 159 aa, synthetic construct
  REGION 1..159: note = AA sequence of anti-defense homologs identified (more details in the specs)
MTQHIGVKLINAFPMTRQAYNDFRGWQLPADENGADEGYLVEYLDGGKPNTDRFDGYVSWSPKEVFEKAYRPVSGLSFGLAIEALKQGKSLQRAGWNGKEQFVYLVKGEKLASALGYDFGEYVGEPTFNDMFVLRNSQNELCAWVPSTGDLMAEDWQIV

SEQ ID NO: 1185 - protein, 156 aa, synthetic construct
  REGION 1..156: note = AA sequence of anti-defense homologs identified (more details in the specs)
MTKHIGVKLINAFHMTRQEYNDFRGWQLPADENGADEGYLVEYLDGGKPNTDRFDGYVSWSPKEVFEKAYRPVSGLSFGLAVEALKQGKKVARNGWNGKGMYLFIIQQNAWGFECDLDGVNGLVTLPCICMKTADDKLVPWLASQTDVLAEDWQIV

SEQ ID NO: 1186 - protein, 87 aa, synthetic construct
  REGION 1..87: note = AA sequence of anti-defense homologs identified (more details in the specs)
MNFGDALAYLKDGKRVARVGWNGKGMFLFLVPGSTFKVNRAPLLGIYPEGTEINYHAHIDMKTAQDTVVPWLASQTDVLAEDWEQVV

SEQ ID NO: 1187 - protein, 166 aa, synthetic construct
  REGION 1..166: note = AA sequence of anti-defense homologs identified (more details in the specs)
MTKHIGVKLVNAFPMNRLAYNDFRGWQLPPDENGADDGYLVEYLDGGKPNTERFDGYVSWSPKEVFEKAYRPVSGLNFGLAIEALKQGKKVSRSGWNGKGMHLQLVKPPQSATPNDWRYDVTCGDEYTFVPGVKLMPWIGMKTADACFVPWLASQTDVLAEDWQII

SEQ ID NO: 1188 - protein, 175 aa, synthetic construct
  REGION 1..175: note = AA sequence of anti-defense homologs identified (more details in the specs)
MTQHIGVKLINAFPMTRQAYNDFRGWQLPAGENGEDEGYLVEYLDGGKPNTDRFDGYVIWSPKEVFEKAYRPVSGLSFGLAIEALKLGNKVARAGWNGKGMWLAYVKPYTEAVHTGSTPCFCSRVFELPEGTHGEPKRSPKQLPYIAMKTADDKLVPWLASQTDVLAEDWQIITM

SEQ ID NO: 1189 - protein, 142 aa, synthetic construct
  REGION 1..142: note = AA sequence of anti-defense homologs identified (more details in the specs)
MRHTEYGYVSPAENHCYRGLERWLADKKKRERRAKKHGAFNLDENKEEAIMDFGEALEALHHGKKVAREGWNGKGMFIYLESGTLISTDRIRNLALAKSTPDSQKYININPHIDMKAADGSIVVGWLASQTDMLANDWEIVK

SEQ ID NO: 1190 - protein, 142 aa, synthetic construct
  REGION 1..142: note = AA sequence of anti-defense homologs identified (more details in the specs)
MRHTEYGYVSPTENHCYRDLERWLADKKKRERRAKKHGAFSLDKNKEEAIMNFGEALEALRHGKKVAREGWNGKGMFIYFESGTLITPDKIRNLTLAKSTPDSQKYININPHIDMKSVDGSIVVGWLASQTDMLANDWVVVE

SEQ ID NO: 1191 - protein, 128 aa, synthetic construct
  REGION 1..128: note = AA sequence of anti-defense homologs identified (more details in the specs)
MNFGQALEAVKTGAKIARSGWNGKGQFVIKAGGYTVDEARPGSDYAKAGIEGKFHISPHLDLKNAQGAMQPGWVPSQGDLFADDWVIADSDEHFQHFLSYSGFYDESPEVIEKLKKAYFDGGYALQWK

SEQ ID NO: 1192 - protein, 146 aa, synthetic construct
  REGION 1..146: note = AA sequence of anti-defense homologs identified (more details in the specs)
MNFGQAIQALKAGYKVARTGWNGKGMFLILISGTKDVVPCEGTPYAALAVSPQGIVTINPHIDMKTATGEMQPGWLASQTDMLAEDWGIVGNETAVNSVGEYELPIGQTVKIDGYPFELREPVRALSGQHVLDVLSADKNTGIQAV

SEQ ID NO: 1193 - protein, 84 aa, synthetic construct
  REGION 1..84: note = AA sequence of anti-defense homologs identified (more details in the specs)
MNFGEALENLKQGKKVARKGWNGKKQYIELATAIRYVNADGKIINCNHDAIGNKAIAFVETLGVQMGWLASQADMLAEDWEAVE

SEQ ID NO: 1194 - protein, 209 aa, synthetic construct
  REGION 1..209: note = AA sequence of anti-defense homologs identified (more details in the specs)
MKALNFGQAIEALKAGLRVARAGWNGKDMWLALSCNGTREVPAAAFWAPPNRAYAEANGGKATVLPSITMKTATGEILMGWLASQTDMLAEDWSILDAGAAAALAGSAEVGKAVPEPAPAAVAAEWKPTAGRMVTVKGYIANGTDEHPGIITRVHGAGEGALVNVTAFPDLQSPKIFSSIPVYTSRTAARDAIVGPSRAAGYAFFPDRV

SEQ ID NO: 1195 - protein, 71 aa, synthetic construct
  REGION 1..71: note = AA sequence of anti-defense homologs identified (more details in the specs)
MDFGEALDALRAGQKVSREGWNGRGMWLALQVPDEHSKMRRPYIYMRPVDGDFVPWVASQSDLLANDWLVV

SEQ ID NO: 1196 - protein, 102 aa, synthetic construct
  REGION 1..102: note = AA sequence of anti-defense homologs identified (more details in the specs)
MDFGQALSALKSGSKVSRSGWNGKGMYVVLQKGYPDGIGANANTAEALGVDEGTVLVFRPYLTMRTVDGEFVPWVASQTDLLAEDWLLAGGIVRPTTDKENP

SEQ ID NO: 1197 - protein, 128 aa, synthetic construct
  REGION 1..128: note = AA sequence of anti-defense homologs identified (more details in the specs)
MDAEVVEHAKAVSKWLRENKNPHATIEITDEGLKMKSDEQFIPMRSSAVISRYSEGLRFKSNNGVLSVKIAHLDFGEAIKAVKEGKQIARKGWNGKNQFVYLIKGTDLQRGLKYGYGEYEGELQLLMC

SEQ ID NO: 1198 - protein, 169 aa, synthetic construct
  REGION 1..169: note = AA sequence of anti-defense homologs identified (more details in the specs)
MWLGCINNLYKMKTLDEKSAEYSAKLCNQSGNYSKGELETAYVLGANESRELQYGEHGTFGQALESVKQGRLATRKGWNGKGMFVFMRPADELHVGFVAKDIKSLPQRVKDYFYRDCVDEKGNPLELKKDDVVKFTAYLCMKAADGTIVNGWLASQTDMLADDWLLFDF

SEQ ID NO: 1199 - protein, 187 aa, synthetic construct
  REGION 1..187: note = AA sequence of anti-defense homologs identified (more details in the specs)
MTYEGIMNALEDGKKVRLPEWRGYWFMDEDGEVLGLTKEGDIVIPWISENHTAAHRLALQQRTDWEIAEGLDFGWAICALKAGKLVTRKGWNGKGMFLFIRPEDELDVDFIVEKVKSLPQSLKNYYAKRDPWMNEETGVISKSQALPNSKVKFTSYICMKAADGTMVNGWLASQTDMLAEDWQLFDS

SEQ ID NO: 1200 - protein, 210 aa, synthetic construct
  REGION 1..210: note = AA sequence of anti-defense homologs identified (more details in the specs)
MPQFRKRPIVIEAVQFDGFENEDEDTPAPMFNGRFHAPDWILDALGKNEGEEGAIYHGDEDLIEDLIIVTLEGNLIARPGDWIIKGVQGEIYPCKPDIFAATYDEGGQQDVGIGKNPLYRGNDMTFGQALDALKEGLRVARAGWNGKGMFLFLVPGSRFKVNRPPLLGIYEEGTEINYHAHIYMKTAQDTVVPWLASQTDALAEDWTVID

SEQ ID NO: 1201 - protein, 139 aa, synthetic construct
  REGION 1..139: note = AA sequence of anti-defense homologs identified (more details in the specs)
MAVMIHSKYGYEPPEWVQADARLDKWCKDKKRRAKQHGAFSLEKNKEEAIMNFGEALEELKQGNCVARKGWNGKGIFIKLKKGESLSTPNNRFNEVMTHDFIYIDTTGLRTNNPNAPMDRVPWLASQTDMLADDWVVVE

SEQ ID NO: 1202 - protein, 95 aa, synthetic construct
  REGION 1..95: note = AA sequence of anti-defense homologs identified (more details in the specs)
VNFGQALESLKRGAKVAREGWNGNGMFIYYVEGTKVKSSQLRGAALDHVGYLGEGDDPEVVINGHIDMKCADGSITVGWNPSQTDMQAEDWEMVE

SEQ ID NO: 1203 - protein, 173 aa, synthetic construct
  REGION 1..173: note = AA sequence of anti-defense homologs identified (more details in the specs)
MTQHIGVKLINAFPMTRQAYNDFRGWQLPAGENGEDEGYLVEYLDGGKPNTDRFDGYVSWSPKEVFEKAYRPVSGLSFGLAIEALKLGNKVSRAGWNGKGMWLAYVKPYTEAVHTGSTPCFCSRVFELPEGTHGESKRSPKQLPYIAMKTADDKLVPWLASQTDVLAEDWQII

SEQ ID NO: 1204 - protein, 153 aa, synthetic construct
  REGION 1..153: note = AA sequence of anti-defense homologs identified (more details in the specs)
MNFGDALKELKAGKRVQRAGWNGKGMFAYLVPAAKYPVQTGAAKTHFGEGAMVPYNPYLAIKNVDETVSTWVPSINDCLADDWQVIGCTVPPHQQRVLDEKQENDVRITKLDEFIDRNALFRQLSLDEQARMRRQLDVMRELSVILGERISAF

SEQ ID NO: 1205 - protein, 180 aa, synthetic construct
  REGION 1..180: note = AA sequence of anti-defense homologs identified (more details in the specs)
QTPGFSLAFAGFFIPNSIGNFMTQHIGVKLINAFPMTRQAYNDFRGWQLPAGENGEDEGYLVEYLDGGKPNTDRFDGYVSWSPKEVFEKAYRPVSGLSFGLAMEALKQGKSLQRAGWNGKDQFVYLVKGEKLASALGYGFGEYVGEPTFNDTLVLKNSQNRLATWVPSIGDLMAEDWQII

SEQ ID NO: 1206 - protein, 214 aa, synthetic construct
  REGION 1..214: note = AA sequence of anti-defense homologs identified (more details in the specs)
MSPFSPTHVSHKQVEAYPIAAAEFQADGSGKVGVNHPEDGYVVVPVPAGFLRHPGAVTEGDMLVRYAPTAEEPLGYLSHSPRAVFEAGYAPLIPAQHRKSYEGGGRGLTFGQALEQLKDGDAVARDGWNGKGMFLLLVPGSQGLTVDEGRPLAKAGVPVGTRFDYLPHIDMWTAQGAFVPWLASQSDMLAEDWCVVQREMPTADHAHDDLGRVA

SEQ ID NO: 1207 - protein, 89 aa, synthetic construct
  REGION 1..89: note = AA sequence of anti-defense homologs identified (more details in the specs)
MNFGKALEELKQGNCVARKGWNGKGIFIKLKKGESLSTPNNRFDEVMTHDFIYIDTTGLHTNNPDAPMDRVPWLASQTDMLADDWVVVE

SEQ ID NO: 1208 - protein, 133 aa, synthetic construct
  REGION 1..133: note = AA sequence of anti-defense homologs identified (more details in the specs)
MINTKYGYVTPQEAEMDGHLDKWMKRRAKQHGAFSLEKNKEKAIMNFGEVLEELKRGNCVARKGWNGKGIFIKLKKGESLNTPNNRFNEVMTHDFIYIDTTGLRTNNPNAPMDRVPWLASQTDMLADDWVVVE

SEQ ID NO: 1209 - protein, 172 aa, synthetic construct
  REGION 1..172: note = AA sequence of anti-defense homologs identified (more details in the specs)
MKLITASVLTALLTSFVATRTVQATPLNRQEYNDLRGWQVPDNENPNDDGYLVVNAGVSERNVDGFDGYVSWLPKLAFEEQYKNDNLTFGQAVELLKGGKKVARKGWNGKGMYLLLATDIDFKTKANLSDMQNENGELTVPSITMKTADNKFAVGWLASQTDMLAEDWVVVQ

SEQ ID NO: 1210 - protein, 112 aa, synthetic construct
  REGION 1..112: note = AA sequence of anti-defense homologs identified (more details in the specs)
MEEMKIVRELLSFGQAIEALKRGGLITREGWNGKGMFVFQQVPSEVPITIVDKMKSLPQAAKDVFKLRFILTPKINTVKYSNQLAIVYPDNSIYGWVASPSDILANDWIALA

SEQ ID NO: 1211 - protein, 101 aa, synthetic construct
  REGION 1..101: note = AA sequence of anti-defense homologs identified (more details in the specs)
MYPFGPLVGPFLFLELENMPHNMNFGDALQAIKDGREVARAGWNGKNQFVFMIKASDYQKTLGFDLKVCDGLAIKTSKNEIQVGWLASQQDMLADDWKIIE

SEQ ID NO: 1212 - protein, 84 aa, synthetic construct
  REGION 1..84: note = AA sequence of anti-defense homologs identified (more details in the specs)
MNFGKALEAAKAGAKIYREGWNGKGMFLFAIQEGHWGFETDIDGVDGYETVGFICMKTADNKLVPWLASQTDILSDDWLAEPVA

SEQ ID NO: 1213 - protein, 162 aa, synthetic construct
  REGION 1..162: note = AA sequence of anti-defense homologs identified (more details in the specs)
MKKHIGTKVVNMQPMTRGAYNAFRGWTVPADENPEDDGYLVEYLDGGNPNTPHYAGYVSWSPKAQAEAAYRPTDGLTFGLALEALKKGLRLARAGWNGKGMFVYLVPAAAYPVQTGAAKAHFGEGSLVPYNAYLGLKGVDDTVSTWVPSVTDCLAEDWRVIE

SEQ ID NO: 1214 - protein, 178 aa, synthetic construct
  REGION 1..178: note = AA sequence of anti-defense homologs identified (more details in the specs)
MELEEKESLQGFIGVKRIKARPMTRRGYNGYRGWQLPADENGDDEGMLVEYVDGGKSNHPAHEGYISWSPIDVFNRAYRPCDALTFGFAIEAAKAGEKIARKGWNGKGMFVFYQKGYPEGIPINKNTAEATRLPEGTVCKFRPYLMMKTAQNDFVPWVASQTDILAEDWEIIEQGEQK

SEQ ID NO: 1215 - protein, 178 aa, synthetic construct
  REGION 1..178: note = AA sequence of anti-defense homologs identified (more details in the specs)
MELEEKESLQGFIGVKRIKARSMTRRGYNGYRGWQLPADENGDDEGMLVEYVDGGKSNHPAHEGYISWSPIDVFNHAYRPCDALTFGFAIEAAKAGEKIARKGWNGKGMFVFYQKGYPEGIPINKNTAEATRLPEGTVCKFRPYLMMKTAQNDFVPWVASQTDILAEDWEIIEQGEQK

SEQ ID NO: 1216 - protein, 159 aa, synthetic construct; identical to SEQ ID NO: 1094
  REGION 1..159: note = AA sequence of anti-defense homologs identified (more details in the specs)

SEQ ID NO: 1217 - protein, 159 aa, synthetic construct
  REGION 1..159: note = AA sequence of anti-defense homologs identified (more details in the specs)
MTQYIGVKLINAFPMTRQAYNDFRGWQLPAGENGEDEGYLVEYLDGGKPNTDRFDGYVSWSPKEVFEKAYRPVSGLSFGLAMEALKQGKSLQRAGWNGKDQFVYLVKGEKLASALGYGFGEYVGEPTFNDTLVLKNSQNRLATWVPSIGDLMAEDWQII

SEQ ID NO: 1218 - protein, 159 aa, synthetic construct
  REGION 1..159: note = AA sequence of anti-defense homologs identified (more details in the specs)
MTQHIGVKLINAFPMTRQAYNDFRGWQLPAGENGEDEGYLVEYLDGGKPNTDRFDGYVSWSPKEVFEKAYRPVSGLSFGLAMEALKQGKSLQRAGWNGKDQFVYLVKGEKLASALGYGFGEYVGEPTFNDTLVLKNSQSRLATWVPSIGDLMAEDWQII

SEQ ID NO: 1219 - protein, 84 aa, synthetic construct
  REGION 1..84: note = AA sequence of anti-defense homologs identified (more details in the specs)
MKEIMTFGEALEAMKAGKKVARTGWNGKGMYLYLADGKLLTQEIGDGSYPFTDSIVMKTADNRYCIGWLASQTDMLAEDWHIVE

SEQ ID NO: 1220 - protein, 150 aa, synthetic construct
  REGION 1..150: note = AA sequence of anti-defense homologs identified (more details in the specs)
MKTLDEKSAEYAASVVSCNKEAKECEGLIQTAYILGAMECELLGEETGTFGQALESLKRGHLVARKGWNGKGMFIFMRPEDSLSADMIVNQVKSLPESFKKWVANNHGDLANDKIKFTAYLCMKAADGTVVNGWLASQTDMLANDWVIVE

SEQ ID NO: 1221 - protein, 159 aa, synthetic construct
  REGION 1..159: note = AA sequence of anti-defense homologs identified (more details in the specs)
MTQHIGVKLINAFPMTRQAYNDFRGWQLPAGENGEDEGYLVEYLDGGKPNTDRFDGYVSWSPKEVFEKAYRPVSGLSFGLAMEALKQGKSLQRAGWNGKDQFVYLVKGEKLASALGYGFGEYVGEPTFNDTLVLKNSQNRLATWAPSIGDLMAEDWQII

SEQ ID NO: 1222 - protein, 159 aa, synthetic construct
  REGION 1..159: note = AA sequence of anti-defense homologs identified (more details in the specs)
MTQHIGVKLINAFPMTRQAYNDFRGWQLPAGENGEDEGYLVEYLDGGKPNTDRFDGYVSWSPKEVFERAYRPVSGLSFGLAMEALKQGKSLQRAGWNGKDQFVYLVKGEKLASALGYGFGEYVGEPTFNDTLVLKNSQNRLATWVPSIGDLMAEDWQII

SEQ ID NO: 1223 - protein, 169 aa, synthetic construct
  REGION 1..169: note = AA sequence of anti-defense homologs identified (more details in the specs)
MGIINLEGGSMTQHIGVKLINAFPMTRQAYNDFRGWQLPADENGADEGYLVEYLDGGKPNTDRFDGYVSWSPKEVFEKAYRPVSGLSFGLAIEALKQGKSLQRAGWNGKEQFVYLVKGEKLASALGYGFGEYVGEPTFNDMFVLRNSQNELCAWVPSTGDLMAEDWQIV

SEQ ID NO: 1224 - protein, 150 aa, synthetic construct
  REGION 1..150: note = AA sequence of anti-defense homologs identified (more details in the specs)
MKTLDEKAAGYAASVVSCNKETKECEGLIQTAYILGAMECELLGEETGTFGQALESLKRGHLVARKGWNGKGMFIFMRPEDSLSTNMIVNQVKSLPESFKRWVANNHGDSETDRIKFTAYLCMKAADGTVVNGWLASQTDMLANDWVIVE

SEQ ID NO: 1225 - protein, 171 aa, synthetic construct
  REGION 1..171: note = AA sequence of anti-defense homologs identified (more details in the specs)
MTFKEALKAMKRGAKVRLPGWLSYYWYWDEEKETVMTHSKPLLIGCEEHETDIKDERVGRFFDDMLREDWMIANEENCPIVCDKAVFSFGDAITYLKKGRKVARKNWNGKGMFLFVADEIHFFTKTELKKKNDEPYDMLPSITMKTADNKCVVGWVPSQTDMLAEDWVFAE

SEQ ID NO: 1226 - protein, 86 aa, synthetic construct
  REGION 1..86: note = AA sequence of anti-defense homologs identified (more details in the specs)
MNFGKAIEAMKKGEKVTRKGWNGKGMFLFLAKSTDIETDADLTVCEHMQGNLVLPSIVMKTADDKFCVGWLASQTDMLAEDWMTIE

SEQ ID NO: 1227 - protein, 172 aa, synthetic construct
  REGION 1..172: note = AA sequence of anti-defense homologs identified (more details in the specs)
MIFKEAFELMKQGAKVKLPGWNGYWCWDNDKQTIMIHCGPKDSDKGQGEILDIRETQRVEYTFMHTQRDDWMIADGENCGVLGGQSTFGFDDAIRYLKRGLKVARKGWNGKGMFLFVADEIHFFTKTELKKKNDEPYDMLPSITMKTADNKCVVGWVPSQTDMFAEDWMFVE

SEQ ID NO: 1228 - protein, 159 aa, synthetic construct
  REGION 1..159: note = AA sequence of anti-defense homologs identified (more details in the specs)
MTQHIGVKLINAFPMTRQAYNDFRGWQLPVGENGEDEGYLVEYLDGGKPNTDRFDGYVSWSPKEVFEKAYRPVSGLSFGLAMEALKQGKSLQRAGWNGKDQFVYLVKGEKLASALGYGFGEYVGEPTFNDTLVLKNSQNLLATWVPSIGDLMAEDWQII

SEQ ID NO: 1229 - protein, 150 aa, synthetic construct
  REGION 1..150: note = AA sequence of anti-defense homologs identified (more details in the specs)
MKTLDERSAEYAANVVSCNKEAKECEGLIQTAYILGAMEGELLGEETGTFGQALESLKRGHLVARKGWNGKGMFIFMRPEDSLSTDMIVNQVKSLPESFKKWVADNHGDSETDKIKFTAYLCMKAADGTVVNGWLASQTDMLANDWVIVE

SEQ ID NO: 1230 - protein, 127 aa, synthetic construct
  REGION 1..127: note = AA sequence of anti-defense homologs identified (more details in the specs)
MEFTLTITRPNAVEVSVNKMKTKNMTFGEALEAIKKGELVCREGWNGKGMFIFQRPEDYLSTDMVVNKVKSLPDAVKKWVANKYGDSETDKIKFTAYLCMKAADDTIVNGWLASQTDMLATDWMIVR

SEQ ID NO: 1231 - protein, 171 aa, synthetic construct
  REGION 1..171: note = AA sequence of anti-defense homologs identified (more details in the specs)
MTFKEALKAMKRGAKVRLPGWLSYYWYWDEEKETVMTHSKPLLIGDEEYETDIKDERVERVFDDMLREDWMIANEENCPILCDKAVFSFGDAITYLKKGRKVARKGWNGKGMFLFVADEIHFFTKTELKKKNDEPYDMLPSIAIKTANNKCIVGWVPSQTDMLAEDWVFAE

SEQ ID NO: 1232 - protein, 84 aa, synthetic construct
  REGION 1..84: note = AA sequence of anti-defense homologs identified (more details in the specs)
MKEIMTFGEALEAMKAGKKVARTGWNGKGMYLYLADGKLLTQEIGDGSYPFTDSIVMKTADNRYCIGWLASQTDMLAGDWCIVE

SEQ ID NO: 1233 - protein, 108 aa, synthetic construct
  REGION 1..108: note = AA sequence of anti-defense homologs identified (more details in the specs)
MVTKNMTFGEALEAIKKGELVCREGWNGKGMFIFQRPEDCLSTDMVVNKVKSLPDAVKKWVASKYGDSETDKIKFTAYLCMKAADDTIVNGWLASQTDMLATDWMIVR

SEQ ID NO: 1234 - protein, 172 aa, synthetic construct
  REGION 1..172: note = AA sequence of anti-defense homologs identified (more details in the specs)
MIFKEAFELMKQGAKVKLPGWNGYWCWDDEKQTIMIHCRPKDSDKGQGEILDIRETQRVEYTFMHTQRDDWMIANEENCGVLGGQSTFGFGDAIRYLKRGLKVTRKGWNGKGMFLFVADEIHFFTKTELKKKNDEPYDMLPSITMKTADNKCVVGWVPSQTDMLAEDWMFVE

SEQ ID NO: 1235 - protein, 159 aa, synthetic construct
  REGION 1..159: note = AA sequence of anti-defense homologs identified (more details in the specs)
MTQHIGVKLINAFPMTRQAYNDFRGWQLPAGENGEDEGYLVEYLDGGKPNTDRFDDYVSWSPKEVFEKAYRPVSGLSFGLAMEALKQGKSLQRAGWNGKDQFVYLVKGEKLASALGYGFGEYVGEPTFNDTLVLKNSQNRLATWVPSIGDLMAEDWQII

SEQ ID NO: 1236 - protein, 93 aa, synthetic construct
  REGION 1..93: note = AA sequence of anti-defense homologs identified (more details in the specs)
MNFGKAIEALKQGKKVARKGWNGKNMFLWLKPAAIVKAEWCKDPMLKAIAEGNGGEIPALGTICMLTAQKEILSGWLASQSDMLSEDWEIIDN

SEQ ID NO: 1237 - protein, 108 aa, synthetic construct
  REGION 1..108: note = AA sequence of anti-defense homologs identified (more details in the specs)
MATKNMTFGEALEAIKKGELVCREGWNGKGMFIFQRPEDCLSTDMVVNKVKSLPDAVKKWVASKYGDSETDKIKFTAYLCMKAADDTIVNGWLASQTDMLATDWMIVR

SEQ ID NO: 1238 - protein, 162 aa, synthetic construct
  REGION 1..162: note = AA sequence of anti-defense homologs identified (more details in the specs)
MNFGQALELLKKGKKVARRGWNGKGMFLYYVPANSYPSCTEIAKEEFGATVEYGAYIAMKTVQGNVVPWLASQTDVLANDWMFEKEERQFDCYGIVYLEKKWVDTLSIGDIFNGYQPQTEIERLCLSLMEELKNTEHPYHSILITEDSFKVLETRQCGMRTE

SEQ ID NO: 1239 - protein, 166 aa, synthetic construct
  REGION 1..166: note = AA sequence of anti-defense homologs identified (more details in the specs)
MKFSEAFKLMKQGAKVKLPGWGGFWYWDAEKETIMIQCRPQDSDTQGDLLDIRETQRVEYTTMNMQSNEWIIADRTNCPILGGEATFSFGEAIKYLKKGMKVARKGWNGKGMYLFLADGEDLTSCLSSGDFECTSSVCMKTAQNNICVGWLASQADMLAEDWVFAK

SEQ ID NO: 1240 - protein, 171 aa, synthetic construct
  REGION 1..171: note = AA sequence of anti-defense homologs identified (more details in the specs)
MNFKSAFRAMRLGAKVKLPKWRGYWYWDSTKKTIMMVEKTKDGKESQHIDIRATLNVKPILMHMQSEYWFIADGTYVDMPDFDFTDGSFENALWWIKMGVKCSRKGWKANKEYVFAASNVSFNTEVGSMFSKELNSEVDAPILVLKTADEFIVGWTPTQEDMFAEDWERVY

SEQ ID NO: 1241 - protein, 171 aa, synthetic construct
  REGION 1..171: note = AA sequence of anti-defense homologs identified (more details in the specs)
MTFKEALKAMKRGAKVRLPGWLAYYWYWDEEKETVMTHSKPLLIGCEEHETDIKDERVGRFFDDMLREDWMIANEENCPIVCDKAVFSFGDAITYLKKGRKVARKNWNGKGMFLLVADEIHFFTKTELKKKNDEPYDMLPSITMKTADNKCVVGWVPSQTDMLAEDWVFAE

SEQ ID NO: 1242 - protein, 159 aa, synthetic construct; identical to SEQ ID NO: 1050
  REGION 1..159: note = AA sequence of anti-defense homologs identified (more details in the specs)

SEQ ID NO: 1243 - protein, 174 aa, synthetic construct
  REGION 1..174: note = AA sequence of anti-defense homologs identified (more details in the specs)
MTFKEALKAMKRGAKVRLPGWLAYYWYWDEEKETVMTHSKPLLTGSEENETDIKDERVGRVFDDMLREDWMIANEENCPILCDKAVFSFGDAIAYLKKGRKVSRKGWKGKGMFLFVADEIHFFTKTELKKKNDEPYDMLPSITMKTADNKCVVGWVPTQADMLAEDWVFAEQED

SEQ ID NO: 1244 - protein, 87 aa, synthetic construct
  REGION 1..87: note = AA sequence of anti-defense homologs identified (more details in the specs)
MNFSFGDAVKEMERGRKVARNGWNGKGMFLFLIAGDCWNFDTDIEGVEDVGGIKTLPFICMKTADNKLVPWLASQTDVIASDWVIIE

SEQ ID NO: 1245 - protein, 172 aa, synthetic construct
  REGION 1..172: note = AA sequence of anti-defense homologs identified (more details in the specs)
MIFKEAFELMKQGAKVKLPGWNGYWCWDNDKQTIMIHCRPKDSDKGHGDVLDIRETQRVEYTFMHTQRDDWMIANEENCGVLGGRSTFGFGDAIRYLKRGLKVARKGWNDKGMFLFVADEIHFFTKTELKKKNDEPYDMLPSITMKTADNKCVVGWVPSQTDMLAEDWMFVE

SEQ ID NO: 1246 - protein, 172 aa, synthetic construct
  REGION 1..172: note = AA sequence of anti-defense homologs identified (more details in the specs)
MVFKEAFELMKQGAKVKLPGWNGYWCWDGEKQTIMIHCRPKDSDKGQGDVLDIRETQRVEYTFMHTQRDDWMIADEENCGVLGGRSTFGFGDAIRYLKRGLKVARKGWNDKGMFLFVADEIHFFTKTELKKKNDEPYDMLPSITMKTADNKCVVGWVPSQTDMLAEDWMFVE

SEQ ID NO: 1247 - protein, 171 aa, synthetic construct
  REGION 1..171: note = AA sequence of anti-defense homologs identified (more details in the specs)
MTFKEALKAMKRGAKVRLPGWLAYYWYWDEEKETVMTHSKPLLTGSEENETDIKDERVGRVFDDMLREDWMIANEENCPILCDKAVFSFGDAIAYLKKGRKVSRKGWKGKGMFLFIADEIHFFTKTELKKENDEPYDMLPSITMKTADNKCVVGWVPTQADMLAEDWVFAE

SEQ ID NO: 1248 - protein, 108 aa, synthetic construct
  REGION 1..108: note = AA sequence of anti-defense homologs identified (more details in the specs)
MVTKNMTFGEALEAIKKGELVCREGWNGKGMFIFQRPEDCLSTDMVVNKVKSLPDAVKKWVANNYGDSETDKIKFTAYLCMKAADDTIVNGWLASQTDMLATDWMIVR

SEQ ID NO: 1249 - protein, 172 aa, synthetic construct
  REGION 1..172: note = AA sequence of anti-defense homologs identified (more details in the specs)
MIFKEAFELMKQGAKVKLPGWNGYWCWDGEKETIMIHCRPKDSDKGQGEVLDIRETQRVEYTFMHTQRDDWMIADEENCGVLGGQSTFGFGDAIRYLKRGLKVARKGWNGKEMFLFVADEIHFFTKTELKKKNDEPYDMLPSITMKTADNKCVVGWVPSQTDMFAEDWMFVE

SEQ ID NO: 1250 - protein, 84 aa, synthetic construct
  REGION 1..84: note = AA sequence of anti-defense homologs identified (more details in the specs)
MTFDNILADLKLGRKVMRKGWNGKGMYIYYVPAQSYPAVTEIAKKEFGTMVPYGAYIAMKTAQGNVVPWLASQTDILAEDWVLI

SEQ ID NO: 1251 - protein, 277 aa, synthetic construct
  REGION 1..277: note = AA sequence of anti-defense homologs identified (more details in the specs)
MFDLESLKDNNTIFWVFHWPSLREAASECGWALAIHGSVVHDLDLMAMPWREDHATADNLASVLSSIINSNVEESRRSIFKYVDEKPNGRVVYTIIGGGTYIDLNVIDSTWPHIKAEQIVEAAKNHENQKGFGRLVHSPVSRGVSSAYGIGFLEGAEWVIDSIEQIVNLGRSNDLIQSKTVMNKNLTFGQAIEALKQGKKVAREGWNGKGMFLWLKPATTIKSEWCKDPILKSIVDANGGETEALGTICMKTADGKVLTGWLASQTDMLLEDWTVVE

SEQ ID NO: 1252 - protein, 99 aa, synthetic construct
  REGION 1..99: note = AA sequence of anti-defense homologs identified (more details in the specs)
MDKNLMDALYVKHDGKIGVLSSDERKVVSQVIGTDLTIVYDKKEGNTYLLIPLTRNHKFECKGNYIIVDGKRFDSDIFFRKDACQWIQMQSNEMLSMVA

SEQ ID NO: 1253 - protein, 103 aa, synthetic construct
  REGION 1..103: note = AA sequence of anti-defense homologs identified (more details in the specs)
MKFGEALEAVKEGELIARSGWNGKDMFVFQRPEDWLSTDMIVNKVKSLPDSFKKYVNDYYDVTETNMIKFCAYLCMKDANDNIVNGWLASQSDMLADDWMVVG

SEQ ID NO: 1254 - protein, 103 aa, synthetic construct
  REGION 1..103: note = AA sequence of anti-defense homologs identified (more details in the specs)
MKFGEALEEVKKGALIARAGWNGKGMFVFQRQEDWLSTDMIVNKVKSLPDSFKKYVNDYYDVTETNMIKFCAYLCMKDANNNIVNGWLASQSDMLADDWMVVG

SEQ ID NO: 1255 - protein, 103 aa, synthetic construct
  REGION 1..103: note = AA sequence of anti-defense homologs identified (more details in the specs)
MKFGEALEEVKKGALIARAGWNGKGMFVFQRPEDWLSTDMIVNKVKSLPDSFKKYVNDYYDVTETNMIKFCAYLCMKDANDNIVNGWLASQSDMLADDWMVVG

SEQ ID NO: 1256 - protein, 103 aa, synthetic construct
  REGION 1..103: note = AA sequence of anti-defense homologs identified (more details in the specs)
MKFGEALEEVKKGALIARAGWNGKGMFVFQRPEDWLSTDIIVNKVKSLPDSFKKYVNDYYDVTETNMIKFCAYLCMKDANDNIVNGWLASQSDMLADDWMVVG

SEQ ID NO: 1257 - protein, 48 aa, synthetic construct
  REGION 1..48: note = AA sequence of anti-defense homologs identified (more details in the specs)
MKFGEALEAVKEGKLIARSGWNGKGMFVFQRPEDWLSTDIIPNSIKLI

SEQ ID NO: 1258 - protein, 103 aa, synthetic construct
  REGION 1..103: note = AA sequence of anti-defense homologs identified (more details in the specs)
MKFGEALEAVKEGKLIARSGWNGKGMFVFQRPEDWLSTDMIVNKVKSLPDSFKKYVNDYYDIDETNMIKFCSYLCMKDANDNIVNGWLASQSDMLADDWMVVG

SEQ ID NO: 1259 - protein, 103 aa, synthetic construct
  REGION 1..103: note = AA sequence of anti-defense homologs identified (more details in the specs)
MKFGEALEAVKEGKLIARSGWNGKGMFVFQRPEDWLSTDTIVNRVKSLPDSFKKYVKDYYDIDETNMIKFCSYLCMKDANDNIVNGWLASQSDMLADDWMVVG

SEQ ID NO: 1260 - protein, 103 aa, synthetic construct
  REGION 1..103: note = AA sequence of anti-defense homologs identified (more details in the specs)
MKFGEALEAVKEGKLIARSGWNGKGMFVFQRPEDWLSTDMIVNKVKSLPDSFKKYVNDYYDVTETNMIKFCAYLCMKDANDNIVNGWLASQSDMLADDWMVVG

SEQ ID NO: 1261 - protein, 103 aa, synthetic construct
  REGION 1..103: note = AA sequence of anti-defense homologs identified (more details in the specs)
MKFGEALEEVKKGALIARAGWNGKGMFVFQRPGDMLSTDMIVNKVKSLPDSFKKYINDYYDITETNMIKFCAYLCMKDANDDIVNGWLASQSDMLADDWMVIG

SEQ ID NO: 1262 - protein, 103 aa, synthetic construct
  REGION 1..103: note = AA sequence of anti-defense homologs identified (more details in the specs)
MKFGEALEAVKEGKLIARSGWNGKGMFVFQRPEDWLSTDTIVNKVKSLPDSFKKYVKDYYDIDETNMIKFCSYLCMKDANDNIVNGWLASQSDMLADDWMVVG

SEQ ID NO: 1263 - protein, 103 aa, synthetic construct
  REGION 1..103: note = AA sequence of anti-defense homologs identified (more details in the specs)
MKFGEALEEVKKGALIARAGWNGKGMFVFQRQEDWLSTDMIVNKVKSLPDSFKKYVNDYYDVTETNMIKFCAYLCMKDANDNIVNGWLASQSDMLADDWMVVG

SEQ ID NO: 1264 - protein, 103 aa, synthetic construct
  REGION 1..103: note = AA sequence of anti-defense homologs identified (more details in the specs)
MKFGEALEEVKKGALIARAGWNGKGMFVFQRPEDWLSTDMIVNKVKSLPDSLKKYVNDYYDVTETNMIKFCAYLCMKDANDNIVNGWLASQSDMLADDWMVVG

SEQ ID NO: 1265 - protein, 103 aa, synthetic construct
  REGION 1..103: note = AA sequence of anti-defense homologs identified (more details in the specs)
MKFGEALEAVKEGKLIARSGWNGKGMFVFQRPEDWLSTDMIVNKVKSLPDSFKKYVNDYYDITETNMIKFCSYLCMKDANDNIVNGWLASQSDMLADDWMVVG

SEQ ID NO: 1266 - protein, 103 aa, synthetic construct
  REGION 1..103: note = AA sequence of anti-defense homologs identified (more details in the specs)
MKFGEALEEVKKGALIARAGWNGKGMFVFQRPEDWLSTDMIVNKVKSLPDSFKKYINDYYDITETNMIKFCAYLCMKDANDDIVNGCLASQSDMLADDWMVIG

SEQ ID NO: 1267 - protein, 60 aa, synthetic construct
  REGION 1..60: note = AA sequence of anti-defense homologs identified (more details in the specs)
MKFGEALEEVKKGALIARAGWNGKGMFVFQRPEDWLSTDMIVNKVKSLPDSFKKIRKRLL

SEQ ID NO: 1268 - protein, 103 aa, synthetic construct
  REGION 1..103: note = AA sequence of anti-defense homologs identified (more details in the specs)
MKFGEALEEVKKGALIARAGWNGKGMFVFQRQEDWLSTDMIVNKVKSLPDSLKKYVNDYYDVTETNMIKFCAYLCMKDANDNIVNGWLASQSDMLADDWMVVG

SEQ ID NO: 1269 - protein, 103 aa, synthetic construct
  REGION 1..103: note = AA sequence of anti-defense homologs identified (more details in the specs)
MKFGEALEAVKEGKLIARSGWNGKDMFVFQRPEDWLSTDIIVNKVKSLPDSFKKYVNDYYDVTETNMIKFCAYLCMKDANDNIVNGWLASQSDMLADDWMVVG

SEQ ID NO: 1270 - protein, 103 aa, synthetic construct
  REGION 1..103: note = AA sequence of anti-defense homologs identified (more details in the specs)
MKFGEALEAVKEGKLIARSGWNGKGMFVFQRPEDWLSTDMIVNKVKSLPDSFKKYVNDYYDIDETNMIKFCSYLCMKDANNNIVNGWLASQSDMLADDWMVVG

SEQ ID NO: 1271 - protein, 60 aa, synthetic construct
  REGION 1..60: note = AA sequence of anti-defense homologs identified (more details in the specs)
MKFGEALEAVKEGKLIARSGWNGKGMFVFQRPEDWLSTDMIVNKVKSLPDSFKKIRKRLL

SEQ ID NO: 1272 - protein, 103 aa, synthetic construct
  REGION 1..103: note = AA sequence of anti-defense homologs identified (more details in the specs)
MKFGEALEAVKEGKLIARSGWNGKGMFVFQRPEDWLSTDTIVNRVKSLPDSFKKYVNDYYDIDETNMIKFCSYLCMKDANDNIVNGWLASQSDMLADDWMVVG

SEQ ID NO: 1273 - protein, 55 aa, synthetic construct
  REGION 1..55: note = AA sequence of anti-defense homologs identified (more details in the specs)
MKFGEALEAVKEGKLIARSGWNGKGMFVFQRPEDWLSTDMIVNKVKSLPDSFKNT

SEQ ID NO: 1274 - protein, 103 aa, synthetic construct
  REGION 1..103: note = AA sequence of anti-defense homologs identified (more details in the specs)
MKFGEALEEVKKGALIARKGWNGKGMFVFQRPGDMLSTDMIVNKVKSLPDSFKKYINDYYDITETNMIKFCAYLCMKDANDDIVNGWVASQSDMLADDWMVIG

SEQ ID NO: 1275 - protein, 103 aa, synthetic construct
  REGION 1..103: note = AA sequence of anti-defense homologs identified (more details in the specs)
MKFGEALEEVKKGALIARAGWNGKGMFVFQRPEDWLSTDMVVNKVKSLPDSFKKYVNDYYDVTETNMIKFCAYLCMKDANDNIVNGWLASQSDMLADDWMVVG

SEQ ID NO: 1276 - protein, 64 aa, synthetic construct
  REGION 1..64: note = AA sequence of anti-defense homologs identified (more details in the specs)
MKFGEALEEVKKGALIARAGWNGKGMFVFQRQEDWLSTDMIVNKVKSLPDSLSDMLANDWMVVG

SEQ ID NO: 1277 - protein, 103 aa, synthetic construct
  REGION 1..103: note = AA sequence of anti-defense homologs identified (more details in the specs)
MKFGEALEAVKEGKLIARSGWNGKGMFVFQRPEDWLPTDMIVNRVKSLPDSFKKYVNDYYDIDETNMIKFCSYLCMKDANDNVVNGWLASQSDMLADDWMVVG

SEQ ID NO: 1278 - protein, 48 aa, synthetic construct
  REGION 1..48: note = AA sequence of anti-defense homologs identified (more details in the specs)
MKFGEALEAVKEGKLIARSGWNGKGMFVFQRPEDWLSTDITPNSIKLI

SEQ ID NO: 1279 - protein, 103 aa, synthetic construct
  REGION 1..103: note = AA sequence of anti-defense homologs identified (more details in the specs)
MKFGEALEEVKKGALIARAGWNGKGMFVFQRPEDWLSTDMIVNKVKSLPDSFKKYVNDYYDVTETNMIKFCAYLCMKDANDNIVNGWLASQSDMLADDWMVIG

SEQ ID NO: 1280 - protein, 103 aa, synthetic construct
  REGION 1..103: note = AA sequence of anti-defense homologs identified (more details in the specs)
MKFGEALEAVKEGKLIARSGWNGKGMFVFRRPEDWLSTDMIVNKVKSLPDSFKKYVNDYYDITETNMIKFCSYLCMKDANDNIVNGWLASQSDMLADDRMVVG

SEQ ID NO: 1281 - protein, 107 aa, synthetic construct
  REGION 1..107: note = AA sequence of anti-defense homologs identified (more details in the specs)
MKFGEALEEVKKGALIARAGWNGKGMFVFQRPEDWLSTDMIVNKVKSLPDSFKKYVNDYYDVYYDVTETNMIKFCAYLCMKDANDNIVNGWLASQSDMLADDWMVVG

SEQ ID NO: 1282 - protein, 103 aa, synthetic construct
  REGION 1..103: note = AA sequence of anti-defense homologs identified (more details in the specs)
MKFGEALEAVKEGKLIARSGWNGKGMFVFQRPEDWLSTDMIVNRVKSLPDSFKKYVNDYYDITETNMIKFCSYLCMKDANDNIVNGWLASQSDMLADDWMVVG

SEQ ID NO: 1283 - protein, 48 aa, synthetic construct
  REGION 1..48: note = AA sequence of anti-defense homologs identified (more details in the specs)
MKFGEALEEVKKGALIARAGWNGKGMFVFQRPEDWLSTDIIPNSINLI

SEQ ID NO: 1284 - protein, 103 aa, synthetic construct
  REGION 1..103: note = AA sequence of anti-defense homologs identified (more details in the specs)
MKFGEALEAVKEGKLIARSGWNGKDMFVFQRPEDWLSTDMIVNKVKSLPDSFKKYVNDYYDVTETNMIKFCAYLCMKDANDNIVNGWLASQSDMLADDWMVVG

SEQ ID NO: 1285 - protein, 103 aa, synthetic construct
  REGION 1..103: note = AA sequence of anti-defense homologs identified (more details in the specs)
MKFGEALEEVKKGALIARAGWNGKGMFVFQRQEDWLSTDMIVNKVKSLPDSFKKYVNDYYDVTETNMIKFCAYLCIKDANNNIVNGWLASQSDMLADDWMVVG

SEQ ID NO: 1286 - protein, 103 aa, synthetic construct
  REGION 1..103: note = AA sequence of anti-defense homologs identified (more details in the specs)
MKFGEALEEVKKGALIARSGWNGKGMFVFQRPEDWLSTDMIVNKVKSLPDSFKKYVNDYYAVTETNMIKFCAYLCMKDANDNIVNGWLASQSDMLADDWMVVG

SEQ ID NO: 1287 - protein, 103 aa, synthetic construct
  REGION 1..103: note = AA sequence of anti-defense homologs identified (more details in the specs)
MKFGEALEEVKKGALIARAGWNGKGMFVFQRPEDWLSTDIIVNKVKSLPDSFKKYVNDYYDVTETNMIKFCAYLCMKDANDNIVNGWLASQSDMLADDWMVVK

SEQ ID NO: 1288 - protein, 103 aa, synthetic construct
  REGION 1..103: note = AA sequence of anti-defense homologs identified (more details in the specs)
MKFGEALEAVKEGKLIARSGWNGKGMFVFQRPEDWLSTDMIVNKVKSLPDSFKKYVNDYYDITETNMIKFCSYLCMKDANDNIVNGWLASQSDMLADDWIVVG

SEQ ID NO: 1289 - protein, 103 aa, synthetic construct
  REGION 1..103: note = AA sequence of anti-defense homologs identified (more details in the specs)
MKFGEALEAVKEGKLIARSGWNGKGMFVFQRPEDWLSTDTIVNRVKSLPDSFKKYVKDYYDIDETNMIKFCSYLCMKDANDNIVNGWLASQSDMLSDDWMVVG

SEQ ID NO: 1290 - protein, 103 aa, synthetic construct
  REGION 1..103: note = AA sequence of anti-defense homologs identified (more details in the specs)
MKFGEALEEVKKGALIARAGWNGKGMFVFQRPEDWLSTDMIVNKVKSLPDSFKKYVNDYYDVTETNMIKFCAYLCMKDANDNIVNGWLASQSDMLDDDWMVVG

SEQ ID NO: 1291 - protein, 103 aa, synthetic construct
  REGION 1..103: note = AA sequence of anti-defense homologs identified (more details in the specs)
MKFGEALEEVKKGALIARAGWNGKGMFVFQRPEDWLSTDMIVNKVKSLPDSFKKYVNDYYDVTETNMIKFCTYLCMKDANDNIVNGWLASQSDMLADDWMVVG

SEQ ID NO: 1292 - protein, 103 aa, synthetic construct
  REGION 1..103: note = AA sequence of anti-defense homologs identified (more details in the specs)
MKFGEALEAVKEGKLIARSGWNGKGMFVFQRPEDWLSTDTIVNRVKSLPDSFKKYVNDYYDIDETNMIKFCSYLCMKDANDNIVNGWLASQSNMLADDWMVVG

SEQ ID NO: 1293 - protein, 97 aa, synthetic construct
  REGION 1..97: note = AA sequence of anti-defense homologs identified (more details in the specs)
MTFGDAIEALKQGKRVARSGWNGKGMFLWLKPAVEIKAEWCKDEALKKLVVENGGTILGIGTICMYTHDSTGRKAILTGWLASQSDMLLEDWVILED

SEQ ID NO: 1294 - protein, 97 aa, synthetic construct
  REGION 1..97: note = AA sequence of anti-defense homologs identified (more details in the specs)
MTFGDAIEALKQGKRVTRSGWNGKGMFLWLKPAVEIKAEWCKDETLKKLVVENGGTILGLGTICMYTHDSTGRKAILTGWLASQSDMLLEDWVILED

SEQ ID NO: 1295 - protein, 172 aa, synthetic construct
  REGION 1..172: note = AA sequence of anti-defense homologs identified (more details in the specs)
MIFKEAFELMKQGAKVKLPGWNGYWCWDNDKQTIMIHCRPKDSDKGQGDVLDIRETQRVEYTFMHTQRDDWMIADEKNCGALGGRSTFGFGDAIRYLKRGLKVARKGWNGKEMFLFVADEIHFFTKTELKKKNDEPYDMLPSITMKTADNKCVVGWVPSQTDMFAEDWMFVE

SEQ ID NO: 1296 - protein, 476 aa, synthetic construct
  REGION 1..476: note = Thoeris (Type I) ThsA AA sequence
MKMNPIVELFIKDFTKEVMEENAAIFAGAGLSMSVGYVSWAKLLEPIAQEIGLDVNKENDLVSLAQYYCNENQGNRGRINQIILDEFSRKVDLTENHKILARLPIHTYWTTNYDRLIEKALEEENKIADVKYTVKQLATTKVKRDAVVYKMHGDVEHPSEAVLIKDDYEKYSIKMDPYIKALSGDLVSKTFLFVGFSFTDPNLDYILSRVRSAYERDQRRHYCLIKKEERRPDELEADFEYRVRKQELFISDLSRFNIKTIVLNNYNEITEILQRIENNIKTKTVFLSGSAVEYNHWETEHAEQFIHQLSKELIRKDFNIVSGFGLGVGSFVINGVLEELYMNQGTIDDDRLILRPFPQGKKGEEQWDKYRRDMITRTGVSIFLYGNKIDKGQVVKAKGVQSEFNISFEQNNYVVPVGATGYIAKDLWNKVNEEFETYYPGADARMKKLFGELNNEALSIEELINTIIEFVEILSN

SEQ ID NO: 1297 - protein, 192 aa, synthetic construct
  REGION 1..192: note = Thoeris (Type I) ThsB AA sequence
MAKRVFFSFHYQDVIDFRVNVVRNHWVTKLNQSAAGVFDASLWEDAKKTSDIALKRLINGGLNNTSVTCVLIGSQTFNRRWVRYEIMKSIEKGNKIIGIHINAFKDKYGNIKSKGPNPFDYLGYQYSSDGKQLHLYEWTGGKWEEYKDLAPYRVNQIAPESLRGKFYSLSSVYRVYDWVADDGYNKFSSWVN

SEQ ID NO: 1298 - protein, 271 aa, synthetic construct
  REGION 1..271: note = Hachimen HamA AA sequence
MTIQDDMVGKHPIENDFWKWLQHEDTESSDLKRHRYLEVDSSNRDEAIKSVAAWLIKYHLSEGKKRVIRKKQEILEKHDFAEYAQSLHVFPKSDKTQKGNLGEIFLSEYLSQTSGVQILVYKLHYNPNIDQSMKGDDVLLVNPDKVLLGESKFRSTPNKRAVEEASELMKDKLTLPMSLGFIADRLFEQGKDELGEVIFDLQFKMSSIEIDIKNIGFLLSTKKVRSIVENNLSSPNSDFIFISLGMDDPAAFLKSVFDYAESNLLEGSYET

SEQ ID NO: 1299 - protein, 1130 aa, synthetic construct
  REGION 1..1130: note = Hachimen HamB AA sequence
MQKVIFWRDLMKLETAYNYFEKLEKDERLQNYISQANSRYILYIANEPLENFPHYTVNLDEKCTHIAFSYLNCGWRFFLEKISDEATKCMEKASEILEYLYAYSDCEKLYKEYYRLVCSLAYYISAQYSKSFIILGKYNSDSYIGKITKLFLTRNFIELERQLEIKYLKNDEETSSENKDNIIYEKILSNAFLHIINFIRTGKMESLESSKDMVRDLITLADINNEPHMWWYFRLLYLVFEEYEDGSLWKVVPPLLDNDDISAKYIYANLYKKKPITEFFKSQRECLDGELLKNDGFVIGMPTSSGKTKVAEVTILKTLTKSPGALCIYIAPYRSLANEVEFSLSSMFEIMGYQVSQLYGGSQTSPLDRQLTKQANVIIVTPEKAKSMLRSNKDLKDRIQLVIIDEGHLVGFQPRYITGELLIEELKIVLKKNNGQLVLLSAVLPNISDFSLWIGEDDKAKRMSVWRPSSQRFGELSLARNTVNINWEGETPSYNKNFITPKLVKPERITKTGRKYAAKYFPADKKEGVAATATKMLDVGSVLIYVGRSNMVLSQARIVSKLFEEKGIEHEWRNKNDWLFVELACIEEYGEDSEILSLLKQGIVPHSSKLPTEVRQSIEKLMANDNPKIIIATSTLGQGVNIGVSTVIVSNVRLDESNTVKVNDFWNIAGRAGRAFTDTEGKILYAIDRNKSQWSIYNQIQMKEMYFKYRNIEKATSGLYLLLRYLFILSEEFEIEYSLFLELLAENRESIDEQKAVEFFSEADQFLELLDDTLISMDIMNEANVLENSSSWIDDVFRSSLAFIQAKQDQSFSEEKMIEILKARNSGVIKLAGEETKWHSIASSSVPLRASLVIEHRIDELLKYVRKYIDSDKSFEELLSLVMELDIFIDSLPISKIEGIEIGANFSEIREGWFSGTSIHILEKRHENVRSICNEYYSFHFPWIVNAIAQKIKLIDCQEESKVLEQISLFAEIGLNNNKSVKIYLAGIKSRNCATELSEKIGMDNDLVTPVKELLLEFFNLCVVKKEDCSEICFNWLKLLNDEKEAKEYVKVKRRSFQFNIPFDLHDNLLYIKKVQSEIWLCSFDYKIKIPVLKEKALFNECSDIPDIFLRKEKGDVWILDSHNPYIIFY

SEQ ID NO: 1300 - DNA, 1456 bp, synthetic construct
  misc_feature 1..1456: note = Thoeris (type II SG32) cloned NA sequence
  source 1..1456: mol_type = other DNA
atgaatataataggtagtgatcgcaatactaacattggaggttttatgtggaagtttaaagaattaataagagataagacatttagaaggtgggctctgagtataattctgactattccaactagtgtgagtacattcatttcatttctagacttggatgctcgttgtagattaattattttacttatattagtagggttgtcgctagtcataataattgttcaattcattagactactttttatgaataatatcactcttaatctcaatggttccgaagttgaaattaaaaaaggtgatatttttgaagtgccaagaaataattataaagtcattgcatttaatgagtattttgacactcaagtagatgacgtaataatcgcccgcgaaacattaaatggtcaatatataaagcgttattattcacatcaagatatcactgagttggatcagaaaattaaagatgacgtaaaacttaaaattgaagaaaaaaatgttgaaagaccttttggaggaaaaacaacacgttacagcttgggatcagtctttaaagatatggatttttttctagttgctttttcgaagtttgatagggaaaatcgtgcccaattaaaactaaatgaatatgcaagctgcatgcttaatgtatggaatgaaatcaatacattacatgcaagcaaagaagtgtttatccccttattaggttctggaataacaagacatgtggattctgatgttggagtcaatgaactattacatataatgttgtggacatttcagatcagtaaagtaaagtttagagaaccagccaaagttacaattcttttgtacaaaaatgatcacaagaagatcaatttttataagttaaaggagtttgagaagaatgggttataggaatggaaattatgctgctttctatgtcagtgaaccgtttagtgaaagtagtttaggggctaatgcaaccaaggattttgtgtcgtataacatgttaagagcatggaaaggaaaagataataactacccatttaatgactcccacgataaaacatacaatgtacgggacggtagtgattgggagaaaacattaaagccaagattaagaaaaagattagatcaatcaaaaaatataatcttttttttaagtaagcatactgaaaacagcaaagctttgcgagaagaaattgattacggtattaatgtgaaggggctaccagttatcgttgtataccctgaactttccgaaaagagtgacatcatcgactgcactacaaaggttttcagatcagaagtggtgaatttatggagtcgagtccctgtttttaaagactctatgctaaaggtaccaactattcatattccttataaaaaagaccaaattaaaaaagctttagagaacaaagattttatgattaattcaaagatttctgcaggttcggtttatttttatccatgttaa

SEQ ID NO: 1301 - protein, 190 aa, synthetic construct
  REGION 1..190: note = Thoeris (type II SG32) ThsB AA sequence
MGYRNGNYAAFYVSEPFSESSLGANATKDFVSYNMLRAWKGKDNNYPFNDSHDKTYNVRDGSDWEKTLKPRLRKRLDQSKNIIFFLSKHTENSKALREEIDYGINVKGLPVIVVYPELSEKSDIIDCTTKVFRSEVVNLWSRVPVFKDSMLKVPTIHIPYKKDQIKKALENKDFMINSKISAGSVYFYPC

SEQ ID NO: 1302 - protein, 297 aa, synthetic construct
  REGION 1..297: note = Thoeris (type II SG32) ThsA AA sequence
MNIIGSDRNTNIGGFMWKFKELIRDKTFRRWALSIILTIPTSVSTFISFLDLDARCRLIILLILVGLSLVIIIVQFIRLLFMNNITLNLNGSEVEIKKGDIFEVPRNNYKVIAFNEYFDTQVDDVIIARETLNGQYIKRYYSHQDITELDQKIKDDVKLKIEEKNVERPFGGKTTRYSLGSVFKDMDFFLVAFSKFDRENRAQLKLNEYASCMLNVWNEINTLHASKEVFIPLLGSGITRHVDSDVGVNELLHIMLWTFQISKVKFREPAKVTILLYKNDHKKINFYKLKEFEKNGL

SEQ ID NO: 1303 - DNA, 35 bp, synthetic construct
  misc_feature 1..35: note = Single strand DNA oligonucleotide
  source 1..35: mol_type = other DNA
caactgagtaaataaatagagcctagtgtaacgac

SEQ ID NO: 1304 - DNA, 23 bp, synthetic construct
  misc_feature 1..23: note = Single strand DNA oligonucleotide
  source 1..23: mol_type = other DNA
ctttgccaagtgttttccctcca

SEQ ID NO: 1305 - DNA, 55 bp, synthetic construct
  misc_feature 1..55: note = Single strand DNA oligonucleotide
  source 1..55: mol_type = other DNA
actcttgttaactctagagctatgtcattcttagacattgtaaaccaagaagcag

SEQ ID NO: 1306 - DNA, 33 bp, synthetic construct
  misc_feature 1..33: note = Single strand DNA oligonucleotide
  source 1..33: mol_type = other DNA
ggctctatttatttactcagttggcaagtctcc

SEQ ID NO: 1307 - DNA, 42 bp, synthetic construct
  misc_feature 1..42: note = Single strand DNA oligonucleotide
  source 1..42: mol_type = other DNA
ggaaaacacttggcaaagaagaaaaaacagaataatgtatcc

SEQ ID NO: 1308 - DNA, 55 bp, synthetic construct
  misc_feature 1..55: note = Single strand DNA oligonucleotide
  source 1..55: mol_type = other DNA
tagcgaaaaatccttttctttcttacccttctccatcagtgttcaataaatcatc

SEQ ID NO: 1309 - RNA, 20 nt, synthetic construct
  misc_feature 1..20: note = gRNA targeting TAD2
  source 1..20: mol_type = other RNA
aagatgatgttcccaaacac
